(19) United States
(12) Patent Application Publication
(10) Pub. No.: US 2013/0052198 A1
(43) Pub. Date: Feb. 28, 2013

(54) ANTI-INFLAMMATORY FACTORS

(71) Applicants: John Miles Milwid, Cambridge, MA (US); Biju Parekkadan, Cambridge, MA (US); Martin Leon Yarmush, Newton, MA (US); Matthew LI, Cambridge, MA (US)

(72) Inventors: John Miles Milwid, Cambridge, MA (US); Biju Parekkadan, Cambridge, MA (US); Martin Leon Yarmush, Newton, MA (US); Matthew LI, Cambridge, MA (US)

(73) Assignees: THE GENERAL HOSPITAL CORPORATION, Boston, MA (US); MASSACHUSETTS INSTITUTE OF TECHNOLOGY, Cambridge, MA (US)

(21) Appl. No.: 13/638,368

(22) PCT Filed: Mar. 29, 2011
(86) PCT No.: PCT/US11/30310

§ 371 Date: Oct. 26, 2012

Related U.S. Application Data
(60) Provisional application No. 61/318,604, filed on Mar. 29, 2010.

(51) Int. Cl. A61K 38/45; C12Q 1/37; A61K 39/395; A61P 29/00; A61K 38/17; A61K 38/22; G01N 33/566; C40B 30/04

(52) U.S. Cl. 424/137.1; 435/7.92; 435/23; 506/9; 424/94.5; 514/1.1; 514/20.9; 514/9.7; 424/172.1; 424/158.1

(57) ABSTRACT

The present invention provides particular anti-inflammatory factors, compositions containing them, methods of making, identifying, and/or characterizing them, and methods of using them. In some embodiments, provided factors are expressed by human bone marrow stromal cells (MSC). In some embodiments, provided factors are characterized by an ability, when contacted with mammalian leukocytes in culture, to alter production of at least one inflammatory or anti-inflammatory agent by the mammalian leukocytes. In some embodiments, provided factors include GALNT1 polypeptides, LGALS3BP polypeptides, MFAP5 polypeptides, PENK polypeptides and/or HAPLN1 polypeptides. In some embodiments, provided factors are useful in the inhibition of inflammatory agents, in the promotion of anti-inflammatory agents, and/or for the treatment of subjects suffering from or susceptible to a disease, disorder or condition characterized by inflammation.

### RELATED APPLICATIONS

[0001] The present application is a national phase application under 35 USC §371 of PCT International Application No. PCT/US2011/030310 (published PCT Application No. WO/2011/126833 A3), filed Mar. 29, 2011, which claims the benefit of U.S. Provisional Patent Application Ser. No. 61/318,604, filed Mar. 29, 2010; the entire contents of which are incorporated herein by reference.

### GOVERNMENT SUPPORT

[0002] The United States Government has provided grant support utilized in the development of the present invention. In particular, the National Human Genome Research Institute (NHGRI) grant number T32 HG002295 and National Institutes of Health (NIH) grant numbers K01DK087770, and R01DK43371 have supported development of this invention. The United States Government has certain rights in the invention.

### BACKGROUND

[0003] Marrow stromal cells (MSCs) are multipotent adult progenitor cells that are being clinically explored as a new therapeutic for treating a variety of immune-mediated diseases. First heralded as a regenerative therapy for skeletal tissue repair, MSCs have recently been shown to modulate endogenous tissue and immune cells.

[0004] MSCs are currently being explored for use in humans because of their potent ability to treat many devastating diseases in animals including acute kidney injury, myocardial infarction, type I diabetes, graft vs. host disease, systemic lupus erythrematosus, multiple sclerosis, pulmonary fibrosis and stroke. While the primary mechanisms of action are yet to be fully elucidated, studies indicate that MSCs can act on several levels of endogenous repair to bring about resolution of disease. MSCs have been shown to protect cells from injury and directly promote tissue repair (Ortiz, Gambelli et al. 2003; Rojas, Xu et al. 2005). When administered to treat animals undergoing acute renal failure, MSCs prevent apoptosis and encourage proliferation of renal tubule epithelial cells in a differentiation-independent manner (Togel, Hu et al. 2005; Togel, Weiss et al. 2007). When injected into the myocardium after infarction, MSCs can differentiate into cardiomyocytes and reduce the incidence of scar formation (Shake, Gruber et al. 2002; Amado, Saliaris et al. 2005; Miyahara, Nagaya et al. 2006). When administered to prevent the onset of type I diabetes mellitus, MSCs protect β-islets from autoimmune attack and promote temporary restoration of glucose regulation when administered after onset of the disease, suggesting protection and repair of damaged islet tissues (Fiorina, Jurewicz et al. 2009).

[0005] In addition to promoting tissue repair directly, MSCs have also been shown to modulate the immune system and attenuate tissue damage caused by excessive inflammation. Initial indications as to the immunomodulatory aspects of MSCs were first observed in the context of MSC transplantation studies in animals and humans. Unexpectedly, MSCs seemed to exhibit an unusual ability to evade the immune system. Initial clinical trials showed that autologous and allogeneic MSCs could be transplanted without immune rejection (Lazarus, Haynesworth et al. 1995; Horwitz, Prockop et al. 1999). Further preclinical studies presented similar findings: human MSCs can engraft and persist in many tissues in prenatal and adult sheep with no apparent rejection (Liechty, MacKenzie et al. 2000); MSC injection in baboons can prolong the life of a transplanted skin graft and suppress T cell proliferation in a dose-dependent manner (Bartholomew, Sturgeon et al. 2002); and injected MSCs can suppress the immune response in mice, and allow for the expansion of tumor cells (Djouad, Plence et al. 2003). The immunosuppressive ability was first exploited clinically in the treatment of an 8-year old boy with severe, acute graft-versus host disease (GvHD), who was refractory to steroid immunosuppression (Le Blanc, Rasmusson et al. 2004). The patient was successfully treated by MSC transplantation. In recent years, this immunosuppression has been found to be an active process and the mechanisms underlying MSC immunomodulation operate at different levels of the innate and adaptive immune system.

[0006] Many studies suggest that MSCs can promote the conversion from a TH1 (cell-mediated) to TH2 (humoral) immune response (Aggarwal and Pittenger 2005). In vitro co-culture experiments have been used to exemplify the effects of MSCs on individual populations of immune cells that favor this conversion at the cellular and molecular level. With respect to adaptive immunity, the majority of in vitro studies have shown that MSCs can directly inhibit CD3+, CD4+ T cell proliferation and secretion of TH1 lymphokines, such as IL-2 and IFN-γ, induced by mixed lymphocyte reactions (MLR), mitogens and TCR or costimulatory receptor engagement. T cells in the presence of MSCs appear to be anergized by the lack of a second danger signal by MSCs, which do not express the co-stimulatory molecules CD80, CD86 and CD40 (Klyushnenkova, Mosca et al. 2005), however this has yet to be definitively proven. Several investigations have also shown a direct suppressive effect of MSCs on cytotoxic CD8+ T cells. MSCs prevented cytolysis of target cells by alloantigen-specific CD8+ T cells when present during the priming of cytotoxic cells (Rasmusson, Uhlin et al. 2007). Some investigators attribute the inhibition of cytotoxicity by MSCs to an intrinsic “veto” function or the generation of suppressor CD8+ cells after coculture (Potian, Aviv et al. 2003), although conflicting data exist. Nonetheless, other reports have also observed generation of CD4+ CD25+ T cells, a cell surface marker expression pattern of both newly activated CD4+ lymphocytes and regulatory T cell (Aggarwal and Pittenger 2005; Prevosto, Zancolli et al. 2007). Whether MSCs directly influence B cells in vivo, some in vitro evidence suggests that MSCs can suppress B cell proliferation (Augello, Tasso et al. 2005; Corcione, Benvenuto et al. 2006). Some reports have shown that MSCs can stimulate antibody secretion and induce polyclonal differentiation and expansion of healthy human B cells (Rasmusson, Le Blanc et al. 2007; Traggiai, Volpi et al. 2008), consistent with the supportive role of stromal cells in B lymphopoiesis. In addition, these same supportive mechanisms may advance the progression of B cell-mediated disease such as multiple myeloma and systemic lupus erythematosus (Arnulf, Lecourt et al. 2007; Traggiai, Volpi et al. 2008). However, it is likely that suppression of T cells by MSCs ultimately contribute to decreased B cell activity in vivo (Gerdoni, Gallo et al. 2007).

[0007] Within an inflamed tissue environment, MSCs are capable of influencing many aspects of the cytotoxic responses to injury and disease (Uccelli, Moretta et al. 2008). MSCs can attenuate natural cytotoxic responses of neutrophils by dampening respiratory burst and inhibiting spontaneous apoptosis in vitro via secretion of IL-6 (Raffaghello, Bianchi et al. 2008). MSCs also possess the ability to suppress proliferation of natural killer (NK) cells (Poggi, Prevosto et al. 2005; Sotiropoulou, Perez et al. 2006; Spaggiari, Capobianco et al. 2008), and attenuate their cytotoxic activity by downregulating the expression of NKp30 and NKG2D, surface receptors involved in NK cell activation (Spaggiari, Capobianco et al. 2006). This is accomplished even while cytokine-activated NK cells are capable of killing MSCs in vitro, suggesting a possible mechanism for MSC rejection in vivo (Spaggiari, Capobianco et al. 2008). MSCs can also revert macrophages to adopt an anti-inflammatory phenotype in the context of sepsis by secreting prostaglandin E2 and conveying a contact-dependent signal to promote IL-10 secretion (Németh, Leelahavanichkul et al. 2008).

[0008] Dendritic cells (DCs) are the major link between innate and adaptive immunity due to their ability to present antigens with high efficiency to lymphocytes. In coculture with MSCs, monocytes failed to differentiate into DCs when cultured in lineage-specifying growth conditions (Beyth, Borovsky et al. 2005; Jiang, Zhang et al. 2005). In addition, MSCs inhibited the maturation of DCs to present appropriate antigens and costimulation to T cells through CD1a, CD40, CD80, CD86, and HLA-DR (Zhang, Ge et al. 2004; Beyth, Borovsky et al. 2005). After coculture with MSCs, DCs were ineffective in their ability to activate lymphocytes by suppressing TNF-α and IFN-γ expression and upregulating IL-10 in DC-CD4+ MLRs (Jiang, Zhang et al. 2005). This interaction was found to be γ-secretase dependent, indicating the role of the Notch pathway in MSC-DC interactions (Li, Paczesny et al. 2008). Ultimately, MSCs may drive, or “license”, DCs to a suppressor phenotype which can further attenuate T cell-mediated immunity.

[0009] Preclinical studies of the mechanism of action suggest that the therapeutic effects afforded by MSC transplantation are short-lived and related to secreted interactions between MSCs and host cells. Efforts have been made to identify secreted factors that are predominantly responsible for the therapeutic activity of MSCs in immune-mediated diseases using biased approaches (Pittenger 2009). To-date, no single factor has been identified that induces the same potent and reproducible reversal of the inflammatory state of an animal or human as MSC transplantation.

### SUMMARY

[0010] Among other things, the present invention provides the identification of individual factors that are secreted by human MSCs using an objective screening approach. The present invention demonstrates that these individual factors cause an anti-inflammatory effect when exogenously delivered. The present invention provides isolated preparations of such factors, as well as compositions containing them, methods of using them, systems for assessing their presence in a sample, etc.

[0011] Thus, for example, the present invention provides particular factors, compositions containing them, methods of making, identifying, and/or characterizing them, and methods of using them.

[0012] In some embodiments, provided factors are polypeptides. In some embodiments, provided factors are produced and/or secreted by bone marrow stromal cells.

[0013] In some embodiments, provided factors polypeptides have immunomodulatory properties. In some embodiments, provided factors are characterized by an ability, when contacted with mammalian leukocytes in culture, to alter production of at least one pro-inflammatory or anti-inflammatory agent by the mammalian leukocytes. In some such embodiments, production is altered at least 10%, at least 20%, at least 30%, at least 40%, at least 50%, at least 100%, at least 150%, at least 200%, at least 250%, at least 300%, at least 350%, at least 400%, at least 450%, at least 500%, or more. In some such embodiments, production is altered at least 1.5 fold, at least 2 fold, at least 2.5 fold, at least 3 fold, at least 3.5 fold, at least 4 fold, at least 4.5 fold, at least 5 fold, at least 5.5 fold, at least 6 fold, at least 6.5 fold, at least 7 fold, at least 7.5 fold, at least 8 fold, at least 8.5 fold, at least 9 fold, at least 9.5 fold, at least 10 fold, or more. In some such embodiments, production is increased. In some such embodiments, production is inhibited. In some such embodiments the at least one agent is a pro-inflammatory agent. In some such embodiments, the at least one agent is an anti-inflammatory agent. In some such embodiments, the at least one pro-inflammatory agent is selected from the group consisting of interleukin-1-α, interleukin-1-β, interleukin-6, tumor necrosis factor-α, leukemia inhibitory factor, interferon-γ, other interferons, oncostatin M, ciliary neurotrophic factor, granulocyte-macrophage colony-stimulating factor, interleukin-11, interleukin-12, interleukin-17, interleukin-18, interleukin-8, and combinations thereof. In some such embodiments, the at least one anti-inflammatory agent is selected from the group consisting of interleukin-10, TGF-β, interleukin-1 receptor antagonist, interleukin-1 soluble receptor, tumor necrosis factor-α soluble receptors I and II, interleukin-4, interleukin-6, interleukin-11, interleukin-13, interleukin-16, interleukin-18 soluble receptor, atrial natriuretic peptide, interleukin-6 soluble receptor, and combinations thereof; in some such embodiments, at least one anti-inflammatory agent is or includes IL-10; in some such embodiments, at least one pro-inflammatory agent is or includes IFN-γ.

[0014] In some embodiments, provided polypeptides are characterized in that, when one or more is/are administered to colitic mice, one or more features of their colitis is/are attenuated.

[0015] In some embodiments, provided polypeptides exert their effects when present at concentrations comparable to those at which such factors are naturally found in human serum. In some embodiments, provided polypeptides exert their effects when present at a concentration comparable to that at which a particular reference factor is naturally found in human serum.

[0016] In some embodiments, the present invention provides GALNT1 polypeptides, compositions containing them, nucleic acids encoding them (and/or complements of such nucleic acids), antibodies that recognize them, and/or methods or making or using such.

[0017] In some embodiments, the present invention provides LGALS3BP polypeptides, compositions containing them, nucleic acids encoding them (and/or complements of such nucleic acids), antibodies that recognize them, and/or methods or making or using such.

[0018] In some embodiments, the present invention provides MFAP5 polypeptides, compositions containing them, nucleic acids encoding them (and/or complements of such nucleic acids), antibodies that recognize them, and/or methods or making or using such.

[0019] In some embodiments, the present invention provides PENK polypeptides, compositions containing them, nucleic acids encoding them (and/or complements of such nucleic acids), antibodies that recognize them, and/or methods or making or using such.

[0020] In some embodiments, the present invention provides HAPLN1 polypeptides, compositions containing them, nucleic acids encoding them (and/or complements of such nucleic acids), antibodies that recognize them, and/or methods or making or using such.

[0021] In some embodiments, compositions provided herein are useful in the inhibition of inflammatory agents and/or in the promotion of anti-inflammatory agents. In some embodiments, such inflammatory agents are selected from the group consisting of interleukin-1-α, interleukin-1-β, interleukin-6, tumor necrosis factor-α, leukemia inhibitory factor, interferon-γ, other interferons, oncostatin M, ciliary neurotrophic factor, granulocyte-macrophage colony-stimulating factor, interleukin-11, interleukin-12, interleukin-17, interleukin-18 and interleukin-8, and combinations thereof. In some embodiments, such anti-inflammatory agents are selected from the group consisting of interleukin-10, TGF-β, interleukin-1 receptor antagonist, interleukin-1 soluble receptor, tumor necrosis factor-α soluble receptors I and II, interleukin-4, interleukin-6, interleukin-11, interleukin-13, interleukin-16, interleukin-18 soluble receptor, atrial natriuretic peptide, interleukin-6 soluble receptor and combinations thereof. In some embodiments, such anti-inflammatory agents are or include IL-10. In some embodiments, such pro-inflammatory agents are or include IFN-γ.

[0022] In some embodiments, compositions provided herein are useful in medicine.

[0023] In some embodiments, compositions provided herein are useful in the treatment of subjects suffering from or susceptible to a disease, disorder or condition. In some such embodiments, the disease, disorder or condition is characterized by inflammation. In some such embodiments, the disease, disorder, or condition is selected from the group consisting of those listed in Table 3, and combinations thereof. In some such embodiments, the disease, disorder, or condition is selected from the group consisting of rheumatoid arthritis, type I and type II diabetes, ulcerative colitis, Crohn's disease, celiac disease, multiple sclerosis, myocardial infarction, neoplasm, chronic infectious disease, systemic lupus erythematosus, acute kidney injury, sepsis, multiple organ dysfunction syndrome, acute liver failure, chronic liver failure, chronic kidney failure, pancreatitis, Grave's disease, and combinations thereof.

[0024] The invention described herein provides a new approach to the treatment of inflammatory diseases, disorders and conditions through the use of purified factors, which Applicants have shown promote induction of anti-inflammatory agents and/or suppress the induction of pro-inflammatory agents.

[0025] Other features and advantages of the invention will be apparent from the following detailed description thereof, and from the claims.

### DEFINITIONS

[0026] Affinity: As is known in the art, “affinity” is a measure of the tightness with which a particular entity binds to its partner. Affinities can be measured in different ways.

[0027] Amino acid: As used herein, the term “amino acid,” in its broadest sense, refers to any compound and/or substance that can be incorporated into a peptide chain. In some embodiments, an amino acid has the general structure H2N—C(H)(R)—COOH. In some embodiments, an amino acid is a naturally-occurring amino acid. In some embodiments, an amino acid is a synthetic or unnatural amino acid; in some embodiments, an amino acid is a d-amino acid; in some embodiments, an amino acid is an 1-amino acid. Amino acids, including carboxy- and/or amino-terminal amino acids, can be modified by methylation, amidation, acetylation, and/or substitution with other chemical groups that can change the peptide's circulating half-life without adversely affecting its activity. An amino acid may participate in a disulfide bond. The term “amino acid” is used interchangeably with “amino acid residue,” and may refer to a free amino acid and/or to an amino acid residue of a peptide. It will be apparent from the context in which the term is used whether it refers to a free amino acid or a residue of a peptide.

[0028] Antibody: As used herein, the term “antibody” refers to any immunoglobulin, whether natural or wholly or partially synthetically produced. All derivatives thereof which maintain specific binding ability are also included in the term. The term also covers any protein having a binding domain that is homologous or largely homologous to an immunoglobulin binding domain. Such proteins may be derived from natural sources, or partly or wholly synthetically produced. In some embodiments, an antibody is monoclonal. In some embodiments, an antibody is polyclonal. In some embodiments, an antibody is a single chain antibody. Those of ordinary skill in the art will appreciate that antibodies may be provided in any of a variety of forms including, for example, humanized, partially humanized, chimeric, chimeric humanized, etc. An antibody may be a member of any immunoglobulin class, including any of the human classes: IgG, IgM, IgA, IgD, and IgE, and of any immunoglobulin subclass (e.g., IgG1, IgG2, IgG3, or IgG4). Typically, an intact antibody is a glycoprotein comprising at least two heavy (H) chains and two light (L) chains inter-connected by disulfide bonds. Each heavy chain is comprised of a heavy chain variable region (abbreviated herein as VH) and a heavy chain constant region. A heavy chain constant region is comprised of three or four domains, CH1, CH2, CH3, and CH4, depending on the isotype. Each light chain is comprised of a light chain variable region (abbreviated herein as VL) and a light chain constant region. A light chain constant region is comprised of one domain, CL. VH and VL regions can be further subdivided into regions of hypervariability, termed complementarity determining regions (CDR), interspersed with regions that are more conserved, termed framework regions (FR). Each VH and VL is composed of three CDRs and four FRs arranged from amino-terminus to carboxy-terminus in the following order: FR1, CDR1, FR2, CDR2, FR3, CDR3, FR4. Variable regions of heavy and light chains contain a binding domain that interacts with an antigen. Constant regions of antibodies may mediate binding of antibodies to host tissues or factors, including various cells of the immune system (e.g., effector cells) and the first component (Clq) of the classical complement system. As used herein, the terms “antibody fragment” (i.e., “antigen-binding portion”) or “characteristic portion of an antibody” are used interchangeably and refer to any derivative of an antibody which is less than full-length. In general, an antibody fragment retains at least a significant portion of the full-length antibody's specific binding ability. Examples of antibody fragments include, but are not limited to, Fab, Fab′, F(ab′)2, scFv, Fv, dsFv diabody, and Fd fragments. An antibody fragment may be produced by any means. For example, an antibody fragment may be enzymatically or chemically produced by fragmentation of an intact antibody and/or it may be recombinantly produced from a gene encoding the partial antibody sequence. Alternatively or additionally, an antibody fragment may be wholly or partially synthetically produced. An antibody fragment may optionally comprise a single chain antibody fragment. Alternatively or additionally, an antibody fragment may comprise multiple chains which are linked together, for example, by disulfide linkages. An antibody fragment may optionally comprise a multimolecular complex. A functional antibody fragment typically comprises at least about 50 amino acids, at least about 100 amino acids, at least about 150 amino acids, or at least about 200 amino acids.

[0029] Antigen binding portion: The term “antigen binding portion” of an antibody, as used herein, refers to one or more fragments of an intact antibody that retain the ability to specifically bind to a given antigen. Antigen binding functions of an antibody can typically be performed by fragments of an intact antibody. Examples of binding fragments encompassed within the term “antigen binding portion” of an antibody include an Fab fragment, a monovalent fragment comprising VL, VH, CL and CH1 domains; an F(ab)2 fragment, a bivalent fragment comprising two Fab fragments (generally one from a heavy chain and one from a light chain) linked by a disulfide bridge at the hinge region; an Fd fragment consisting of the VH and CH1 domains; an Fv fragment comprising the VL and VH domains of a single arm of an antibody and a single domain antibody (dAb) fragment (Ward et al., 1989 Nature, 341:544-546), that contains a VH domain; and an isolated complementarity determining region (CDR). Although the two domains of the Fv fragment, VL and VH, are usually encoded by separate genes, they can be joined (e.g., using recombinant technology and/or by including a linker polypeptide) as a single protein chain in which the VL and VH regions pair to form monovalent molecules (known as single chain Fv (scFv); see, e.g., Bird et al., 1988 Science, 242:423-426; and Huston et al., 1988 Proc. Natl. Acad. Sci., 85:5879-5883). Such single chain antibodies include one or more “antigen binding portions” of an antibody. Antibody fragments may be obtained or produced using conventional techniques known to those of skill in the art; if desired, fragments can be screened for binding in the same manner as are intact antibodies. Alternatively or additionally, antigen binding portions can be incorporated into single domain antibodies, maxibodies, minibodies, intrabodies, diabodies, triabodies, tetrabodies, v-NAR and bis-scFv (see, e.g., Hollinger and Hudson, 2005 Nature Biotechnology, 23(9):1126-1136). Similarly, antigen binding portions can alternatively or additionally be incorporated into single chain molecules comprising a pair of tandem Fv segments (VH—CH1-VH—CH1) which, together with complementary light chain polypeptides, form a pair of antigen binding regions (Zapata et al., 1995 Protein Eng., 8(10):1057-1062; and U.S. Pat. No. 5,641,870).

[0030] Anti-inflammatory agent: The term “anti-inflammatory agent”, as used herein, refers to a factor made by a leukocyte or other cell to counteract the effects of inflammatory cytokines and other agents that mimic the actions of inflammatory cytokines. In some embodiments, an anti-inflammatory agent is a cytokine. In some embodiments, and anti-inflammatory agent is selected from the group consisting of interleukin-10, TGF-β, interleukin-1 receptor antagonist, interleukin-1 soluble receptor, tumor necrosis factor-α soluble receptors I and II, interleukin-4, interleukin-6, interleukin-11, interleukin-13, interleukin-16, interleukin-18 soluble receptor, atrial natriuretic peptide, interleukin-6 soluble receptor and combinations thereof. In some embodiments, an agent that mimics one or more biological activities of interleukin-10, TGF-β, interleukin-1 receptor antagonist, interleukin-1 soluble receptor, tumor necrosis factor-α soluble receptors I and II, interleukin-4, interleukin-6, interleukin-11, interleukin-13, interleukin-16, interleukin-18 soluble receptor, atrial natriuretic peptide, interleukin-6 soluble receptor and combinations thereof may be considered to be an anti-inflammatory agent as described herein.

[0031] Binding: It will be understood that the term “binding”, as used herein, typically refers to a non-covalent association between or among entities. In some embodiments, binding is addressed with respect to particular moieties of a targeting agent. It will be appreciated by those of ordinary skill in the art that such binding may be assessed in any of a variety of contexts. In some embodiments, an agent “specifically binds”, meaning that it discriminates between its intended target and other materials present within the sample with which it is contacted.

[0032] Characteristic sequence: A “characteristic sequence” is a sequence that is found in all members of a family of polypeptides or nucleic acids, but not in polypeptides or nucleic acids not in the family, and therefore can be used by those of ordinary skill in the art to define members of the family. In some embodiments, a characteristic sequence element in a polypeptide comprises a stretch of contiguous amino acids, typically 5 amino acids, e.g., at least 5-500, at least 5-250, at least 5-100, at least 5-75, at least 5-50, at least 5-25, at least 5-15, or at least 5-10 amino acids, that shows at least about 80%, at least 85%, at least 90%, at least 95%, at least 96%, at least 97%, at least 98%, at least 99%, or 100% identity with other polypeptides in the family or class. In some embodiments, a characteristic sequence element participates in or confers function on a polypeptide.

[0033] Comparable to: The term “comparable to” is sometimes used herein to refer specifically to an amount of a factor used in a particular context as compared with an amount of such a factor naturally found in human serum. In some embodiments, an amount is considered to be “comparable to” a reference amount if it is within an order of magnitude (i.e., ten times higher or lower than) of the reference amount. In some embodiments, an amount is considered to be “comparable to” a reference amount if it is within 9, 8, 7, 6, 5, 4, 3, 2, 1.9, 1.8, 1.7, 1.6, 1.5, 1.4, 1.3, 1.2, or 1.1 fold (i.e., times higher or lower than) the reference amount.

[0034] Corresponding to: As used herein, the term “corresponding to” is used to designate the position/identity of an amino acid residue in a polypeptide of interest, as compared with a reference polypeptide. In general, an amino acid residue in a polypeptide of interest is a residue that is found in a corresponding sequence context and/or performs a corresponding role to its cognate residue in the reference polypeptide. Those of ordinary skill in the art are well familiar with strategies and technologies for performing sequence comparisons and can readily identify corresponding amino acids. For example, as is well known in the art, two or more nucleotide or amino acid sequences can be aligned using standard bioinformatic tools, including programs such as BLAST, ClustalX, Sequencher, etc. Even though the two or more sequences may not match exactly and/or do not have the same length, an alignment of the sequences can still be performed and, if desirable, a “consensus” sequence generated. Indeed, programs and algorithms used for alignments typically tolerate definable levels of differences, including insertions, deletions, inversions, polymorphisms, point mutations, etc. Such alignments can aid in the determination of which positions in one sequence correspond to which positions in other sequences.

[0035] Dosing Regimen: A “dosing regimen”, as that term is used herein, refers to a set of unit doses (typically more than one) that are administered individually separated by periods of time. In some embodiments, a dosing regimen is a therapeutic regimen.

[0036] Factor: the term “factor” as used herein, refers to an agent of any chemical class or composition that has the recited characteristic or property. For example, a factor may be or include small molecules, biological molecules (e.g., polypeptides, lipids, carbohydrates, nucleic acids, etc., including for example, glycoproteins, glycolipids, proteoglycans, lipoproteins, etc.), metals, vitamins, etc. A factor may be comprised of a single chemical entity, or may comprise a collection of chemical entities associated with one another (e.g., in a complex).

[0037] GALNT1 polypeptide: The term “GALNT1 polypeptide”, as used herein, refers to a polypeptide that shares certain structural and/or functional characteristics with UDP-N-acetyl-α-D-galactosamine:polypeptide N-acetylgalactosaminyltransferase 1 (GalNac-T1; GALNT1) as described herein. Reference GALNT1 polypeptides have sequences presented in Table 2. In some embodiments, an GALNT1 polypeptide is characterized in that it shows at least 50%, at least 55%, at least 60%, at least 65%, at least 70%, at least 75%, at least 80%, at least 85%, at least 86%, at least 87%, at least 88%, at least 89%, at least 90%, at least 91%, at least 92%, at least 93%, at least 94%, at least 95%, at least 96%, at least 97%, at least 98%, at least 99%, or more overall sequence identity with a sequence presented in Table 2. In some embodiments, an GALNT1 polypeptide is characterized in that it includes an amino acid sequence element found in a sequence selected from the group consisting of GenBank Accession Numbers: AAH90583.1, AAH47746.1, AAH38440.1, AAH90962.1, AAH56215.1, BAI47186.1, EAX01360.1, EAX01359.1, CAD44535.1, EDL76133.1, EDK96994.1, EDK96993.1; NCBI Reference Sequence Numbers: NP_{—}065207.2, NP_{—}001083410.1, NP_{—}001153876.1, NP_{—}038842.3, NP_{—}077349.1, NP_{—}803485.1, NP_{—}001025547.1, NP_{—}001006381.1; and combinations thereof. In some embodiments, a GALNT1 polypeptide is characterized in that it includes an amino acid sequence element found in a sequence selected from the group consisting of any of the sequences presented in Table 2 and SEQ ID NO: 24-438.

[0038] In some embodiments, a GALNT1 polypeptide has an amino acid sequence identical to that of a polypeptide that is naturally produced by marrow stromal cells. In some embodiments, a GALNT1 polypeptide is characterized by an ability, when contacted with mammalian leukocytes in culture, to increase production of at least one anti-inflammatory agent (and/or to decrease production of at least one pro-inflammatory agent) by the mammalian leukocytes. In some such embodiments, production is increased (or decreased) at least 10%, at least 20%, at least 30%, at least 40%, at least 50%, at least 100%, at least 150%, at least 200%, at least 250%, at least 300%, at least 350%, at least 400%, at least 450%, at least 500%, or more. In some such embodiments, production is increased (or decreased) at least 1.5 fold, at least 2 fold, at least 2.5 fold, at least 3 fold, at least 3.5 fold, at least 4 fold, at least 4.5 fold, at least 5 fold, at least 5.5 fold, at least 6 fold, at least 6.5 fold, at least 7 fold, at least 7.5 fold, at least 8 fold, at least 8.5 fold, at least 9 fold, at least 9.5 fold, at least 10 fold, or more. In some such embodiments the at least one anti-inflammatory agent is selected from the group consisting of interleukin-10, TGF-β, interleukin-1 receptor antagonist, interleukin-1 soluble receptor, tumor necrosis factor-α soluble receptors I and II, interleukin-4, interleukin-6, interleukin-11, interleukin-13, interleukin-16, interleukin-18 soluble receptor, atrial natriuretic peptide, interleukin-6 soluble receptor and combinations thereof; in some such embodiments, the at least one anti-inflammatory agent is or includes IL-10. In some embodiments, a GALNT1 polypeptide is characterized in that, when it is administered to colitic mice, one or more features of their colitis is/are attenuated. The sequence corresponding to GenBank Accession Number AAH47746.1 (SEQ ID NO: 224), which is a GALNT1 polypeptide, is typically expressed in mammalian cells at a level within the range of 0.21 fg*cell⁻¹*hour⁻¹.

[0039] Gene: The term “gene” is used herein according to its art-understood meaning to refer to a sequence of nucleotides that is expressed in a cell. In some embodiments, a gene may encode one or more polypeptides, including for example, polypeptides that are related to one another as splice variants. In some embodiments, a gene includes one or more introns; in some embodiments a gene does not include any introns. In some embodiments, a gene is referred to by reference to the name of a polypeptide that it encodes.

[0040] Human antibody: As used herein, the term “human antibody”, includes antibodies having variable regions in which both the framework and CDR regions are derived from sequences of human origin. In certain embodiments, if an antibody contains a constant region, the constant region also is derived from such human sequences, e.g., human germline sequences, or mutated versions of human germline sequences. Human antibodies may include amino acid residues not encoded by human sequences (e.g., mutations introduced by random or site-specific mutagenesis in vitro or by somatic mutation in vivo). However, the term “human antibody”, as used herein, is not intended to include antibodies in which CDR sequences derived from the germline of another mammalian species, such as a mouse, have been grafted onto human framework sequences.

[0041] Identity: As used herein, the term “identity” refers to the overall relatedness between polymeric molecules, e.g., between nucleic acid molecules (e.g., DNA molecules and/or RNA molecules) and/or between polypeptide molecules. Calculation of the percent identity of two nucleic acid sequences, for example, can be performed by aligning the two sequences for optimal comparison purposes (e.g., gaps can be introduced in one or both of a first and a second nucleic acid sequences for optimal alignment and non-identical sequences can be disregarded for comparison purposes). In certain embodiments, the length of a sequence aligned for comparison purposes is at least 30%, at least 40%, at least 50%, at least 60%, at least 70%, at least 80%, at least 90%, at least 95%, or substantially 100% of the length of the reference sequence. The nucleotides at corresponding nucleotide positions are then compared. When a position in the first sequence is occupied by the same nucleotide as the corresponding position in the second sequence, then the molecules are identical at that position. The percent identity between the two sequences is a function of the number of identical positions shared by the sequences, taking into account the number of gaps, and the length of each gap, which needs to be introduced for optimal alignment of the two sequences. The comparison of sequences and determination of percent identity between two sequences can be accomplished using a mathematical algorithm.

[0042] In combination: The phrase “in combination”, as used herein, refers to two or more agents that are simultaneously administered to a subject. It will be appreciated that two or more agents are considered to be administered “in combination” whenever a subject is simultaneously exposed to both (or more) of the agents. Each of the two or more agents may be administered according to a different schedule; it is not required that individual doses of different agents be administered at the same time, or in the same composition. Rather, so long as both (or more) agents are present (e.g., at relevant levels) in the subject's body, they are considered to be administered “in combination”.

[0043] Inflammatory agent: The term “inflammatory agent” (or “pro-inflammatory agent”), as used herein, refers to a factor made by a leukocyte or other cell in response to an inflammatory stimulus. In some embodiments, an inflammatory agent is a cytokine. In some embodiments, an inflammatory agent is selected from the group consisting of interleukin-1-α, interleukin-1-β, interleukin-6, tumor necrosis factor-α, leukemia inhibitory factor, interferon-γ, other interferons, oncostatin M, ciliary neurotrophic factor, granulocyte-macrophage colony-stimulating factor, interleukin-11, interleukin-12, interleukin-17, interleukin-18 and interleukin-8, and combinations thereof. In some embodiments, an agent that mimics one or more biological activities of interleukin-1-α, interleukin-1-β, interleukin-6, tumor necrosis factor-α, leukemia inhibitory factor, interferon-γ, other interferons, oncostatin M, ciliary neurotrophic factor, granulocyte-macrophage colony-stimulating factor, interleukin-11, interleukin-12, interleukin-17, interleukin-18 and interleukin-8, and/or combinations thereof may be considered to be an inflammatory cytokine. By “inflammatory cytokine” is meant a protein made by a leukocyte or other cell in response to an inflammatory stimulus.

[0044] Isolated: The term “isolated,” is used herein, to describe an agent or entity that has either (i) been separated from at least some of the components with which it was associated when initially produced (whether in nature or in an experimental setting); and/or (ii) produced by the hand of man. Isolated agents or entities may be separated from at least about 10%, at least about 20%, at least about 30%, at least about 40%, at least about 50%, at least about 60%, at least about 70%, at least about 80%, at least about 90%, or more of the other components with which they were initially associated. An isolated entity may be partially or completely pure. A partially pure agent or entity is substantially free of other materials (e.g., is at least 80%, at least 81%, at least 82%, at least 83%, at least 84%, at least 85%, at least 86%, at least 87%, at least 88%, at least 89%, at least 90%, at least 91%, at least 92%, at least 93%, at least 94%, at least 95%, at least 96%, at least 97%, at least 98%, at least 99%, or more pure).

[0045] LGALS3BP polypeptide: The term “LGALS3BP polypeptide”, as used herein, refers to a polypeptide that shares certain structural and/or functional characteristics with lectin, galactoside-binding, soluble, 3 binding protein (LGALS3BP) as described herein. Reference LGALS3BP polypeptides have sequences presented in Table 2. In some embodiments, an LGALS3BP polypeptide is characterized in that it shows at least 50%, at least 55%, at least 60%, at least 65%, at least 70%, at least 75%, at least 80%, at least 85%, at least 86%, at least 87%, at least 88%, at least 89%, at least 90%, at least 91%, at least 92%, at least 93%, at least 94%, at least 95%, at least 96%, at least 97%, at least 98%, at least 99%, or more overall sequence identity with a sequence presented in Table 2. In some embodiments, an LGALS3BP polypeptide is characterized in that it includes an amino acid sequence element found in a sequence selected from the group consisting of GenBank Accession Numbers: CAM23109.1, AAA36193.1, AAI14269.1, AAH81724.1, AAH90658.1, AAH15761.1, AAH02998.1, AAH02403.1; BAI45468.1, EAW89546.1, EAW89545.1, EAW89544.1, EAW89543.1, CAM23110.1, ABM86350.1, AAI05368.1, EDM06756.1, EDM06755.1, EDL34662.1, EDL34661.1, ABM83150.1; NCBI Reference Sequence Numbers: NP_{—}005558.1, NP_{—}620796.1, NP_{—}035280.1, NP_{—}001035130.1; and combinations thereof. In some embodiments, an LGALS3BP polypeptide is characterized in that it includes an amino acid sequence element found in a sequence selected from the group consisting of any of the sequences presented in Table 2, FIG. 4, and SEQ ID NO: 329-353. In some embodiments, an LGALS3BP polypeptide has an amino acid sequence identical to that of a polypeptide produced by marrow stromal cells. In some embodiments, an LGALS3BP polypeptide is characterized by an ability, when contacted with mammalian leukocytes in culture, to increase production of at least one anti-inflammatory agent (and/or to decrease production of at least one pro-inflammatory agent) by the mammalian leukocytes. In some such embodiments, production is increased (or decreased) at least 10%, at least 20%, at least 30%, at least 40%, at least 50%, at least 100%, at least 150%, at least 200%, at least 250%, at least 300%, at least 350%, at least 400%, at least 450%, at least 500%, or more. In some such embodiments, production is increased (or decreased) at least 1.5 fold, at least 2 fold, at least 2.5 fold, at least 3 fold, at least 3.5 fold, at least 4 fold, at least 4.5 fold, at least 5 fold, at least 5.5 fold, at least 6 fold, at least 6.5 fold, at least 7 fold, at least 7.5 fold, at least 8 fold, at least 8.5 fold, at least 9 fold, at least 9.5 fold, at least 10 fold, or more. In some such embodiments the at least one anti-inflammatory agent is selected from the group consisting of interleukin-10, TGF-β, interleukin-1 receptor antagonist, interleukin-1 soluble receptor, tumor necrosis factor-α soluble receptors I and II, interleukin-4, interleukin-6, interleukin-11, interleukin-13, interleukin-16, interleukin-18 soluble receptor, atrial natriuretic peptide, interleukin-6 soluble receptor and combinations thereof; in some such embodiments, the at least one anti-inflammatory agent is or includes IL-10. In some embodiments, an LGALS3BP polypeptide is characterized in that, when it is administered to colitic mice, one or more features of their colitis is attenuated. The sequence corresponding to GenBank Accession Number AAH02998 (SEQ ID NO: 339), which is an LGALS3BP, is typically expressed in mammalian cells at a level within the range of 4.2 fg*cell⁻¹*hour⁻¹.

[0046] Marrow stromal cell: The term “marrow stromal cell”, as used herein, is meant to be synonymous with mesenchymal stem cell and mesenchymal stromal cell. As is known in the art, such cells are found in (and can be isolated from) such tissues as, but not limited to, bone marrow, adipose tissue, placental tissue, amniotic fluid, synovial fluid or joints, lymph nodes, thymus, spleen, testes, skin. Alternatively or additionally, marrow stromal cells for use in accordance with the present invention can be derived from another stem cell such as an embryonic stem cell. In some embodiments, a marrow stromal cell is a cell that exhibits an immunophenotype including, but not limited to the markers CD11−, CD14−, CD18−, CD31−, CD34−, CD40−, CD45−, CD56−, CD80−, CD86−, MHCII−, CD29+, CD44+, CD71+, CD73+, CD90+, CD105+, CD106+, CD120a+, CD124, CD166+, Stro-1+, ICAM-1+, MHCI+.

[0047] Marrow stromal cell factors: The term “marrow stromal cell factors”, as used herein, refers in general to factors that are naturally produced by marrow stromal cells. Such factors may be of any chemical class, including, for example, polypeptides, lipids, carbohydrates, nucleic acids, etc. (including, for example, glycoproteins, glycolipids, proteoglycans, lipoproteins, etc). Specifically provided marrow stromal cell factors include gene products produced by stromal cells that, when isolated from the cells, modulate inflammatory activity. In some embodiments, provided marrow stromal cell factors include products of GALNT1, LGALS3BP, MFAP5, PENK and/or HAPLN1 genes. For example, in some embodiments, provided marrow stromal cell factors include GALNT1 polypeptides, nucleic acids encoding them (and/or complements of such nucleic acids); LGALS3BP polypeptides, nucleic acids encoding them (and/or complements of such nucleic acids); MFAP5 polypeptides, nucleic acids encoding them (and/or complements of such nucleic acids); PENK polypeptides, nucleic acids encoding them (and/or complements of such nucleic acids); and combinations thereof). It will be appreciated by those of ordinary skill in the art that a marrow stromal cell factor as described herein retains its identity as a marrow stromal cell factor regardless of its mode of production. In some embodiments, marrow stromal cell factors described herein are in fact produced by or in marrow stromal cells. In some embodiments, marrow stromal cell factors described herein are produced in alternative systems (e.g., in a recombinant system such as a eukaryotic or prokaryotic cell that has been engineered by the hand of man to produce the marrow stromal cell factor and/or in a cell-free or synthetic system).

[0048] MFAP5 polypeptide: The term “MFAP5 polypeptide”, as used herein, refers to a polypeptide that shares certain structural and/or functional characteristics with microfibrillar-associated protein 5 (MFAP5) as described herein. Reference MFAP5 polypeptides have sequences presented in Table 1. In some embodiments, an MFAP5 polypeptide is characterized in that it shows at least 50%, at least 55%, at least 60%, at least 65%, at least 70%, at least 75%, at least 80%, at least 85%, at least 86%, at least 87%, at least 88%, at least 89%, at least 90%, at least 91%, at least 92%, at least 93%, at least 94%, at least 95%, at least 96%, at least 97%, at least 98%, at least 99%, or more overall sequence identity with a sequence presented in Table 1. In some embodiments, an MFAP5 polypeptide is characterized in that it includes an amino acid sequence element found in a sequence selected from the group consisting of GenBank Accession Numbers: AAH05901.1, AAA96752.1, AAD53950.1, EAW88614.1, EAW88613.1, AAH25131.1, ACE87011.1, AAI02770.1, EDK99687.1, EDK99686.1, EDK99685.1; and NCBI Reference Sequence Numbers: NP_{—}056591.1, NP_{—}003471.1, NP_{—}776811.1, NP_{—}001102114.1; and combinations thereof. In some embodiments, an MFAP5 polypeptide is characterized in that it includes an amino acid sequence element found in a sequence selected from the group consisting of any of the sequences presented in Table 2 and SEQ ID NO: 130-144. In some embodiments, an MFAP5 polypeptide has an amino acid sequence identical to that of a polypeptide that is naturally produced by marrow stromal cells. In some embodiments, an MFAP5 polypeptide is characterized by an ability, when contacted with mammalian leukocytes in culture, to increase production of at least one anti-inflammatory agent (and/or decrease production of at least one pro-inflammatory agent) by the mammalian leukocytes. In some such embodiments, production is increased (or decreased) at least 10%, at least 20%, at least 30%, at least 40%, at least 50%, at least 100%, at least 150%, at least 200%, at least 250%, at least 300%, at least 350%, at least 400%, at least 450%, at least 500%, or more. In some such embodiments, production is increased (or decreased) at least 1.5 fold, at least 2 fold, at least 2.5 fold, at least 3 fold, at least 3.5 fold, at least 4 fold, at least 4.5 fold, at least 5 fold, at least 5.5 fold, at least 6 fold, at least 6.5 fold, at least 7 fold, at least 7.5 fold, at least 8 fold, at least 8.5 fold, at least 9 fold, at least 9.5 fold, at least 10 fold, or more. In some such embodiments the at least one anti-inflammatory agent is selected from the group consisting of interleukin-10, TGF-β, interleukin-1 receptor antagonist, interleukin-1 soluble receptor, tumor necrosis factor-α soluble receptors I and II, interleukin-4, interleukin-6, interleukin-11, interleukin-13, interleukin-16, interleukin-18 soluble receptor, atrial natriuretic peptide, interleukin-6 soluble receptor and combinations thereof; in some such embodiments, the at least one anti-inflammatory agent is or includes IL-10. In some embodiments, an MFAP5 polypeptide is characterized in that, when it is administered to colitic mice, one or more features of their colitis is attenuated. The sequence corresponding to NCBI Reference Sequence Number NP_{—}003471.1 (SEQ ID NO: 136), which is a MFAP5 polypeptide, is typically expressed in mammalian cells at a level within the range of 209 fg*cell⁻¹*hour⁻¹.

[0049] Nucleic acid: As used herein, the term “nucleic acid,” in its broadest sense, refers to any compound and/or substance that is or can be incorporated into an oligonucleotide chain. In some embodiments, a nucleic acid is a compound and/or substance that is or can be incorporated into an oligonucleotide chain via a phosphodiester linkage. In some embodiments, “nucleic acid” refers to individual nucleic acid residues (e.g. nucleotides and/or nucleosides). In some embodiments, “nucleic acid” refers to an oligonucleotide chain comprising individual nucleic acid residues. In some embodiments, a “nucleic acid” is or comprises RNA and/or DNA. In some embodiments, a “nucleic acid” is partially or wholly single stranded; in some embodiments, a “nucleic acid” is partially or wholly double stranded. In some embodiments, a “nucleic acid” described herein may include one or more nucleic acid analogs. In some embodiments, a nucleic acid may include “peptide nucleic acids,” which are known in the art and have peptide bonds instead of phosphodiester bonds in the backbone. The term “nucleotide sequence encoding an amino acid sequence” refers to the set of nucleotide sequences that are degenerate versions of each other and/or encode the same amino acid sequence. In some embodiments, a nucleic acid may include introns. Nucleic acids can be prepared according to any available technique, including, for example, isolation from natural sources, recombinant expression, chemical synthesis, etc. A nucleic acid sequence is presented in the 5′ to 3′ direction unless otherwise indicated. In some embodiments, a nucleic acid is or comprises natural nucleosides (e.g. adenosine, thymidine, guanosine, cytidine, uridine, deoxyadenosine, deoxythymidine, deoxyguanosine, and deoxycytidine); nucleoside analogs (e.g., 2-aminoadenosine, 2-thiothymidine, inosine, pyrrolo-pyrimidine, 3-methyl adenosine, 5-methylcytidine, C-5 propynyl-cytidine, C-5 propynyl-uridine, 2-aminoadenosine, C5-bromouridine, C5-fluorouridine, C5-iodouridine, C5-propynyl-uridine, C5-propynyl-cytidine, C5-methylcytidine, 2-aminoadenosine, 7-deazaadenosine, 7-deazaguanosine, 8-oxoadenosine, 8-oxoguanosine, O(6)-methylguanine, and 2-thiocytidine); chemically modified bases; biologically modified bases (e.g., methylated bases); intercalated bases; modified sugars (e.g., 2′-fluororibose, ribose, 2′-deoxyribose, arabinose, and hexose); and/or modified phosphate groups (e.g., phosphorothioates and 5′-N-phosphoramidite linkages).

[0050] Nucleic acid analog: The term “nucleic acid analog” is used herein to refer to a nucleic acid having a non-natural feature. In some embodiments, a nucleic acid analog has other than a phosphodiester backbone. In some embodiments, a nucleic acid analog has a non-natural base or sugar, etc. In some embodiments, analogs have modified bases or sugars and/or backbone modifications, etc. as compared with a reference natural nucleic acid.

[0051] Nucleic acid segment: The term “nucleic acid segment” is used herein to refer to a nucleic acid sequence that is a portion of a longer nucleic acid sequence. In some embodiments, a nucleic acid segment comprises at least 3, at least 4, at least 5, at least 6, at least 7, at least 8, at least 9, at least 10, at least 11, at least 12, at least 13, at least 14, at least 15, at least 16, at least 17, at least 18, at least 19, at least 20, at least 21, at least 22, at least 23, at least 24, at least 25, at least 26, at least 27, at least 28, at least 29, at least 30, at least 31, at least 32, at least 33, at least 34, at least 35, at least 36, at least 37, at least 38, at least 39, at least 40, at least 41, at least 42, at least 43, at least 44, at least 45, at least 46, at least 47, at least 48, at least 49, at least 50, at least 55, at least 60, at least 65, at least 70, at least 75, at least 80, at least 86, at least 90, at least 95, at least 100, or more residues.

[0052] PENK polypeptide: The term “PENK polypeptide”, as used herein, refers to a polypeptide that shares certain structural and/or functional characteristics with proenkephalin (PENK; also called preproenkephalin and/or proenkephalin A) as described herein. Reference PENK polypeptides have sequences presented in Table 2. In some embodiments, a PENK polypeptide is characterized in that it shows at least 50%, at least 55%, at least 60%, at least 65%, at least 70%, at least 75%, at least 80%, at least 85%, at least 86%, at least 87%, at least 88%, at least 89%, at least 90%, at least 91%, at least 92%, at least 93%, at least 94%, at least 95%, at least 96%, at least 97%, at least 98%, at least 99%, or more overall sequence identity with a sequence presented in Table 1. In some embodiments, a PENK polypeptide is characterized in that it includes an amino acid sequence element found in a sequence selected from the group consisting of GenBank Accession Numbers: CAG46627.1, CAG46607.1, AAH90311.1, AAI07707.1, AAH83563.1, ACI66659.1, AAH32505.1, AAV84279.1, AAB59409.1, ABM84953.1, ABM81791.1, ABM81797.1, AAH78348.2, AAI11280.1; NCBI Reference Sequence Numbers: NP_{—}001129162.1, NP_{—}006202.1, NP_{—}001002927.1, NP_{—}001088343.1, NP_{—}001015744.1, NP_{—}001166888.1, NP_{—}878303.1, NP_{—}058835.1, NP_{—}776566.1, NP_{—}001135308.1; and combinations thereof. In some embodiments, a PENK polypeptide is characterized in that it includes an amino acid sequence element found in a sequence selected from the group consisting of any of the sequences presented in Table 1, Table 2, and SEQ ID NO: 194-217. In some embodiments, a PENK polypeptide has an amino acid sequence identical to that of a polypeptide that is naturally produced by marrow stromal cells. In some embodiments, a PENK polypeptide is characterized by an ability, when contacted with mammalian leukocytes in culture, to increase production of at least one anti-inflammatory agent (and/or to decrease production of at least one pro-inflammatory agent) by the mammalian leukocytes. In some such embodiments, production is increased (or decreased) at least 10%, at least 20%, at least 30%, at least 40%, at least 50%, at least 100%, at least 150%, at least 200%, at least 250%, at least 300%, at least 350%, at least 400%, at least 450%, at least 500%, or more. In some such embodiments, production is increased (or decreased) at least 1.5 fold, at least 2 fold, at least 2.5 fold, at least 3 fold, at least 3.5 fold, at least 4 fold, at least 4.5 fold, at least 5 fold, at least 5.5 fold, at least 6 fold, at least 6.5 fold, at least 7 fold, at least 7.5 fold, at least 8 fold, at least 8.5 fold, at least 9 fold, at least 9.5 fold, at least 10 fold, or more. In some such embodiments the at least one anti-inflammatory agent is selected from the group consisting of interleukin-10, TGF-β, interleukin-1 receptor antagonist, interleukin-1 soluble receptor, tumor necrosis factor-α soluble receptors I and II, interleukin-4, interleukin-6, interleukin-11, interleukin-13, interleukin-16, interleukin-18 soluble receptor, atrial natriuretic peptide, interleukin-6 soluble receptor and combinations thereof; in some such embodiments, the at least one anti-inflammatory agent is or includes IL-10. In some embodiments, a PENK polypeptide is characterized in that, when it is administered to colitic mice, one or more features of their colitis is/are attenuated. The sequence corresponding to GenBank Accession Number AAH32505 (SEQ ID NO: 209), which is a PENK polypeptide, is typically expressed in mammalian cells at a level within the range of 4.2 fg*cell⁻¹*hour⁻¹.

[0053] HAPLN1 polypeptide: The term “HAPLN1 polypeptide”, as used herein, refers to a polypeptide that shares certain structural and/or functional characteristics with Hyaluronan and proteoglycan link protein 1 (HAPLN1) as described herein. Reference HAPLN1 polypeptides have sequences presented in Table 2. In some embodiments, an HAPLN1 polypeptide is characterized in that it shows at least 50%, at least 55%, at least 60%, at least 65%, at least 70%, at least 75%, at least 80%, at least 85%, at least 86%, at least 87%, at least 88%, at least 89%, at least 90%, at least 91%, at least 92%, at least 93%, at least 94%, at least 95%, at least 96%, at least 97%, at least 98%, at least 99%, or more overall sequence identity with a sequence presented in Table 2. In some embodiments, an HAPLN1 polypeptide is characterized in that it includes an amino acid sequence element found in a sequence selected from the group consisting of GenBank Accession Number: AAH57808.1, AAI51456.1, BAD52342.1, AAH66853.1, BAI47315.1, EAW95914.1, EAW95913.1, EAW95912.1, EDM09988.1, EDL00984.1, AAI28741.1; NCBI Reference Sequence Number: NP_{—}038528.3, NP_{—}001875.1, NP_{—}001007791.1, NP_{—}001075973.1; and combinations thereof. In some embodiments, an HAPLN1 polypeptide is characterized in that it includes an amino acid sequence element found in a sequence selected from the group consisting of any of the sequences presented in Table 2, FIG. 7, and SEQ ID NO: 41-55. In some embodiments, an HAPLN1 polypeptide has an amino acid sequence identical to that of a polypeptide that is naturally produced by marrow stromal cells. In some embodiments, an HAPLN1 polypeptide is characterized by an ability, when contacted with mammalian leukocytes in culture, to decrease production of at least one pro-inflammatory agent (and/or to increase production of at least one anti-inflammatory agent) by the mammalian leukocytes. In some such embodiments, production is decreased (or increased) at least 10%, at least 20%, at least 30%, at least 40%, at least 50%, at least 100%, at least 150%, at least 200%, at least 250%, at least 300%, at least 350%, at least 400%, at least 450%, at least 500%, or more. In some such embodiments, production is decreased (or increased) at least 1.5 fold, at least 2 fold, at least 2.5 fold, at least 3 fold, at least 3.5 fold, at least 4 fold, at least 4.5 fold, at least 5 fold, at least 5.5 fold, at least 6 fold, at least 6.5 fold, at least 7 fold, at least 7.5 fold, at least 8 fold, at least 8.5 fold, at least 9 fold, at least 9.5 fold, at least 10 fold, or more. In some such embodiments the at least one pro-inflammatory agent is selected from the group consisting of interleukin-1-α, interleukin-1-β, interleukin-6, tumor necrosis factor-α, leukemia inhibitory factor, interferon-γ, other interferons, oncostatin M, ciliary neurotrophic factor, granulocyte-macrophage colony-stimulating factor, interleukin-11, interleukin-12, interleukin-17, interleukin-18 and interleukin-8, and combinations thereof; in some such embodiments, at least one pro-inflammatory agent is or includes IFN-γ. In some embodiments, an HAPLN1 polypeptide is characterized in that, when it is administered to subjects with diseases with inflammatory diseases, one or more features of their inflammatory disease is attenuated. The sequence corresponding to GenBank Accession Number: AAH57808.1 (SEQ ID NO: 41), which is an HAPLN1 polypeptide, is naturally typically expressed in mammalian cells at a level within the range of 4.2 fg*cell⁻¹*hour⁻¹.

[0054] Polypeptide: The term “polypeptide”, as used herein, generally has its art-recognized meaning of a polymer of at least three amino acids. In some embodiments, a polypeptide comprises natural amino acids. In some embodiments, a polypeptide comprises one or more amino acid analogs (i.e., entities that can be incorporated into a polypeptide chain via a peptide bond). In some embodiments, one or more residues in a polypeptide is not a natural amino acid and/or contains a modification (e.g., an attached glycan group or other polymer group, etc) as compared with a reference natural amino acid. The term “polypeptide” is also used herein to refer to amino acid polymers that share a degree of sequence identity and/or biological functionality. For example, in some embodiments, a “polypeptide” has an amino acid sequence exactly as recited herein. In some embodiments, a “polypeptide” has an amino acid sequence that is a fragment of a sequence that is recited herein (or in a reference or database specifically mentioned herein); in some such embodiments, the fragment shows some or all of the biological activities of the polypeptide having the complete recited sequence. In some such embodiments, a fragment comprises at least 7, at least 8, at least 9, at least 10, at least 11, at least 12, at least 13, at least 14, at least 15, at least 16, at least 17, at least 18, at least 19, at least 20, at least 21, at least 22, at least 23, at least 24, at least 25, at least 26, at least 27, at least 28, at least 29, at least 30, at least 31, at least 32, at least 33, at least 34, at least 35, at least 36, at least 37, at least 38, at least 39, at least 40, at least 41, at least 42, at least 43, at least 44, at least 45, at least 46, at least 47, at least 48, at least 49, at least 50, at least 55, at least 60, at least 65, at least 70, at least 75, at least 80, at least 85, at least 90, at least 95, at least 100, at least 110, at least 120, at least 130, at least 140, at least 150, at least 160, at least 170, at least 180, at least 190, at least 200, at least 210, at least 220, at least 230, at least 240, at least 250, at least 260, at least 270, at least 280, at least 290, at least 300 amino acids, or more. In some embodiments, a “polypeptide” shares at least about 30-40% overall sequence identity, often greater than about 50%, greater than about 60%, greater than about 70%, or greater than about 80%, and/or includes at least one region of much higher identity, often greater than 90% or even greater than 95%, greater than 96%, greater than 97%, greater than 98%, or greater than 99% in one or more highly conserved regions, usually encompassing at least 3-4 and often up to 20 or more amino acids, with another polypeptide (i.e., a reference polypeptide, for example, of the same class). Other regions of similarity and/or identity can be determined by those of ordinary skill in the art by analysis of the sequences of various polypeptides. In some embodiments, two or more polypeptides are considered to be of the same class because they show such overall sequence identity and/or share one or more characteristic sequence elements. In some embodiments, two or more polypeptides are considered to be of the same class because they share one or more biological activities and one or more common structural features (e.g., a given level of overall sequence identity and/or one or more characteristic sequence elements). In general, polypeptides described herein may be produced by any available means. For example, in some embodiments, a polypeptide may be isolated from a natural source. In some embodiments, a polypeptide may be produce recombinantly (i.e., in or from a host cell engineered by the hand of man to produce the polypeptide). In some embodiments, a polypeptide may be produced in a cell-free system. In some embodiments, a polypeptide may be synthesized.

[0055] Pure: As used herein, an agent or entity is “pure” if it is substantially free of other components. For example, in some embodiments, a preparation that contains more than about 90% of a particular agent or entity is typically considered to be a pure preparation. In some embodiments, an agent or entity is at least 90%, at least 91%, at least 92%, at least 93%, at least 94%, at least 95%, at least 96%, at least 97%, at least 98%, or at least 99% pure.

[0056] Sample: As used herein, a “test sample” refers to a biological sample obtained from a subject of interest. In some embodiments, a “test sample” comprises a biological fluid (e.g., blood, joint fluid, mucous, saliva, semen, synovial fluid, tears, urine, etc). In some embodiments, a “test sample” comprises one or more cells. In some embodiments, a “test sample” comprises tissue. In some embodiments, a test sample is a sample that is processed (e.g., by one or more of filtration, distillation, extraction, concentration, inactivation of interfering components, addition of reagents, and the like) from a raw sample obtained directly from the subject. In some embodiments, a processed sample is partially or completely purified.

[0057] Specificity: As is known in the art, “specificity” is a measure of the ability of a particular entity to distinguish first binding partner from one or more other available potential binding partners. In some embodiments, an entity having specificity has at least 50%, at least 100%, at least 2-fold, at least 3-fold, at least 4-fold, at least 5-fold, at least 10-fold, at least 20-fold, at least 50-fold, at least 100-fold, at least 200-fold, at least 500-fold, or at least 1000-fold higher affinity for a first binding partner than for a second binding partner.

[0058] Subject: As used herein, the term “subject” or “patient” refers to an organism to which a composition described herein may be administered, e.g., for experimental, diagnostic, prophylactic, and/or therapeutic purposes, and/or from which a sample may be obtained. Typical subjects include animals (e.g., mammals such as mice, rats, rabbits, non-human primates, and humans; insects; worms; etc.). In many embodiments, a subject is a mammal. In many embodiments, a subject is a human.

[0059] Suffering from: An individual who is “suffering from” a disease, disorder, and/or condition (e.g., disease, disorder or condition characterized by inflammation) has been diagnosed with and/or displays one or more symptoms of a disease, disorder, and/or condition.

[0060] Susceptible to: An individual who is “susceptible to” a disease, disorder, and/or condition (e.g., disease, disorder or condition characterized by inflammation) has not been diagnosed with a disease, disorder, and/or condition. In some embodiments, an individual who is susceptible to a disease, disorder, and/or condition may exhibit symptoms of the disease, disorder, and/or condition. In some embodiments, an individual who is susceptible to a disease, disorder, and/or condition may not exhibit symptoms of the disease, disorder, and/or condition. In some embodiments, an individual who is susceptible to a disease, disorder, and/or condition will develop the disease, disorder, and/or condition. In some embodiments, an individual who is susceptible to a disease, disorder, and/or condition will not develop the disease, disorder, and/or condition.

[0061] Therapeutic agent: As used herein, the phrase “therapeutic agent” refers to any agent that elicits a desired biological or pharmacological effect. In some embodiments, a therapeutic agent elicits a desired biological or pharmacological effect when administered in a therapeutic regimen.

[0062] Therapeutic regimen: A “therapeutic regimen” typically comprises a collection of individual doses of a therapeutic agent, delivered according to a determined schedule and via a designated route or routes. In many embodiments, a therapeutic regimen is one whose use correlates with achievement of a particular therapeutic effect in an organism (e.g., an animal or human).

[0063] Therapeutically effective amount: The term “therapeutically effective amount” of an agent or combination of agents is intended to refer to an amount of agent(s) which confers a therapeutic effect on the treated subject, at a reasonable benefit/risk ratio applicable to any medical treatment. The therapeutic effect may be objective (i.e., measurable by some test or marker) or subjective (i.e., subject gives an indication of or feels an effect). A therapeutically effective amount is commonly administered in a dosing regimen that may comprise multiple unit doses. In some embodiments of the present invention, a composition may be considered to contain a therapeutically effective amount of an agent(s) if it contains an amount appropriate for administration as a unit dose in the context of a therapeutic regimen. For any particular pharmaceutical agent, a therapeutically effective amount (and/or an appropriate unit dose within an effective dosing regimen) may vary, for example, depending on route of administration, on combination with other pharmaceutical agents. Also, the specific therapeutically effective amount (and/or unit dose) for any particular patient may depend upon a variety of factors including the disorder being treated and the severity of the disorder; the activity of the specific pharmaceutical agent employed; the specific composition employed; the age, body weight, general health, sex and diet of the patient; the time of administration, route of administration, and/or rate of excretion or metabolism of the specific pharmaceutical agent employed; the duration of the treatment; and like factors as is well known in the medical arts.

[0064] Treatment: As used herein, the term “treatment” refers to any method used to partially or completely alleviate, ameliorate, relieve, inhibit, prevent, delay onset of, reduce severity of, reduce incidence of, and/or yield prophylaxis of one or more symptoms or aspects of a disease, disorder, or condition. In some embodiments, treatment can involve administration of one or more doses before, during, and/or after onset of symptoms.

[0065] Unit dose: The term “unit dose”, as used herein, refers to a discrete administration of a pharmaceutical agent, typically in the context of a dosing regimen.

[0066] Variant: As used herein, the term “variant” is a relative term that describes the relationship between a particular polypeptide (e.g., a myostatin antagonist polypeptide having a sequence similar to that of myostatin) of interest and a reference polypeptide (e.g., in many embodiments, a wild type polypeptide) to which its sequence is being compared. A polypeptide of interest is considered to be a “variant” of a reference polypeptide if the polypeptide of interest has an amino acid sequence that is identical to that of the reference but for a small number of sequence alterations (e.g., insertions, substitutions, and/or deletions) at particular positions. Typically, fewer than 20%, fewer than 15%, fewer than 10%, fewer than 9%, fewer than 8%, fewer than 7%, fewer than 6%, fewer than 5%, fewer than 4%, fewer than 3%, fewer than 2%, fewer than 1%, or fewer of the residues in the variant are altered as compared with the parent. In some embodiments, a variant has 10, 9, 8, 7, 6, 5, 4, 3, 2, or 1 altered residues as compared with a parent. Often, a variant has a very small number (e.g., fewer than 5, fewer than 4, fewer than 3, fewer than 2, or fewer than 1) number of altered functional residues (i.e., residues that participate in a particular biological activity). In some embodiments, a variant not more than 5, not more than 4, not more than 3, not more than 2, or not more than 1 additions or deletions as compared with the reference polypeptide; in many embodiments, a variant has no additions or deletions (although it may have one or more substitutions) as compared with the reference polypeptide. In many embodiments, variants that contain additions and/or deletions contain additions and/or deletions of fewer than about 25, fewer than about 20, fewer than about 19, fewer than about 18, fewer than about 17, fewer than about 16, fewer than about 15, fewer than about 14, fewer than about 13, fewer than about 10, fewer than about 9, fewer than about 8, fewer than about 7, fewer than about 6, residues, and commonly are fewer than about 5, fewer than about 4, fewer than about 3, fewer than about 2, or fewer than about 1 residue. In some embodiments, the parent polypeptide is one found in nature.

[0067] Vector: As used herein, “vector” refers to a nucleic acid molecule capable of transporting another nucleic acid to which it has been linked. In some embodiment, vectors are capable of extra-chromosomal replication and/or expression of nucleic acids to which they are linked in a host cell such as a eukaryotic or prokaryotic cell. Vectors capable of directing the expression of operatively linked genes are referred to herein as “expression vectors.”

[0068] Wild type: As is understood in the art, the phrase “wild type” generally refers to a normal form of a protein or nucleic acid, as is found in nature. For example, wild type polypeptides found in nature (e.g., from mammalian sources, such as human, pig, cow, etc.) include those presented in Table 2. Those of ordinary skill will understand how to identify wild type polypeptides and will understand the scope of the term as used herein.

### DESCRIPTION OF THE DRAWING

[0069] The Drawing of the present disclosure is comprised of the following Figures:

[0070] FIG. 1: MSC conditioned medium causes peripheral blood mononuclear cells to secrete IL-10 in response to LPS, providing the basis for differential gene expression analysis to identify genes responsible for the increased activity. (a) Generalized schematic of EPS methodology. Protein products are derived from various cell types in the form of conditioned media and screened for activity in an in vitro potency assay. Based on the activity of the conditioned media from the cells, hierarchical comparative gene expression profiling is performed to select for genes uniquely upregulated in the cell type with the highest activity in the potency assay. Recombinant protein products of the enriched gene list are then screened in a potency assay and the candidates with the highest activity are assessed for activity in vivo. (b) In vitro potency assay. This assay entails incubating primary human peripheral blood mononuclear cells (PBMCs) in the presence of protein products (e.g., conditioned medium from a cell) for 16 hours, followed by stimulation of the PBMCs with LPS for five hours, and measurement of IL-10 secretion into the supernatant via ELISA. (c) Time course of IL-10 expression from PBMCs when incubated with either bone marrow stromal cell conditioned medium (BMSC-CM) or unconditioned medium (DMEM) in the potency assay. (d) Comparison of potency assay activity of conditioned medium from normal human dermal fibroblasts (FB-CM), BMSCs (BMSC-CM) and BMSCs preincubated with LPS prior to conditioning (BMSC_{LPS}-CM). * p<0.001 compared to FB-CM, ** p<0.001 compared to BMSC-CM. (e) Schematic of the differential gene expression comparison strategy to select for genes uniquely expressed at high levels in LPS stimulated MSCs (MSC_{LPS}) compared to MSCs and fibroblasts (FBs). Analysis was then conducted on the genes identified to select for genes that were most likely to be responsible for secreted proteins. MSC_{LPS}, LPS stimulated MSC; FB, fibroblast. (f) Gene expression profiling revealed 22 genes responsible for secreted proteins that were upregulated by BMSCs stimulated with LPS compared to BMSCs and FBs.

[0071] FIG. 2: Characterization of IL-10 assay and optimization of BMSC preconditioning. (a) Kinetics of IL-10 secretion by PBMCs incubated with or without BMSC-CM and stimulated with LPS. (b) Dose response of the potency assay to increasing concentration of BMSC-CM. 1×CM was either diluted or concentrated further to generate the different concentrations. * p<0.001 compared to DMEM. (c) Effect of proteinase K on the activity of BMSC-CM in the potency assay. (d) Effects of preconditioning on the activity of BMSC-CM in the potency assay.

[0072] FIG. 3: Liquid chromatography of BMSC-CM Chromatography was used to fractionate the BMSC-CM into 0.5 mL fractions and then the fractions were evaluated for IL-10 activity in the potency assay. (a) Fractions generated by size exclusion chromatography. (b) Fractions generated by anion exchange chromatography.

[0073] FIG. 4: Screen of recombinant proteins that reveals four factors capable of significantly upregulating IL-10 in PBMCs. Recombinant proteins from 22 genes were acquired and screened for their ability to cause an upregulation of IL-10 in peripheral blood mononuclear cells stimulated with LPS. (a) Of the recombinant proteins screened, four exhibited a greater than 3-fold increase of IL-10 secretion over baseline at concentrations in the range of 5 μg/mL, GALNT1, LGALS3BP, MFAP5 and PENK. The normalized secretion described here is in reference to baseline IL-10 secretion in PBMCs never exposed to recombinant protein. (b) The presence of LGALS3BP, and MFAP5 were confirmed in the MSC conditioned medium via ELISA and western blotting. * p<0.001 compared to FB-CM. (c) Partial list of proteins contained in 10×FB-CM, BMSC-CM, and BMSC_{LPS}-CM detected by proteomic mass spectrometry. Mass spectrometry of the MSC conditioned medium confirmed the presence of six proteins identified in the gene screen as secreted factors of MSCs. The sequences presented in panel (c) are as follows:

(SEQ ID NO: 1)
PAQGVVTTLENVSPPR
(SEQ ID NO: 2)
EINLAPDSSSVVVSGLMVATK
(SEQ ID NO: 3)
IYTSPTWSAFVTDSSWSAR
(SEQ ID NO: 4)
TLQALEFHTVPFQLLAR
(SEQ ID NO: 5)
YDALEVFAGSGTSGQR
(SEQ ID NO: 6)
GESGYVASEGFPNYLPPNK
(SEQ ID NO: 7)
VYTAQNPSAQALGLGK
(SEQ ID NO: 8)
EFDDDTYDNDIALLQLK
(SEQ ID NO: 9)
QFQADFTSLSDQEPLHVAQALQK
(SEQ ID NO: 10)
VFQQVAQASK
(SEQ ID NO: 11)
NLPSDSQDLGQHGLEEDFM*L
(SEQ ID NO: 12)
GPMFELLPGESNK

[0074] FIG. 5: Three proteins expressed by MSCs and LPS-stimulated MSCs exhibit IL-10 activity that is comparable to MSC-CM. From the list of genes upregulated in LPS-stimulated MSCs compared to MSCs and fibroblasts, 18 proteins were chosen for the initial screen and six positive hits identified. The three highlighted in this figure induce the highest production of IL-10 in the IL-10 assay. (a) Compared to 1× and 10×MSC-CM activity normalized by baseline expression of IL-10 by PBMCs incubated with basal medium, three factors exhibited superior increased production of IL-10. Proteins were serially diluted and then subjected to the same PBMC assay conditions as performed on MSC-CM. (b) All three proteins identified exhibited a unique window of activity as identified by order of magnitude serial dilution. LGALS3PB, galactin-3-binding protein; MFAP5, microfibrillar-associated protein 5; GALNT1, UDP-N-acetyl-α-D-galactosamine:polypeptide N-acetylgalactosaminyltransferase 1.

[0075] FIG. 6: Administered MFAP5 and LGALS3BP protect mice from developing TNBS colitis. Mice were presensitized via the skin with 1% TNBS one week prior to intra-rectal administration of 3 mg of TNBS per mouse in a mixture of 50% EtOH and 50% sterile water to induce colitis. Mice were treated with 3 μg each of MFAP5, LGALS3BP and GALNT1 twice over a 24 hour period, once in conjunction with the TNBS administration and once 24 hours later. Mice were then sacrificed at day 2 and tissue collected for analysis. As expected, mice treated with vehicle (saline) developed extensive inflammation of the colon with loss of crypts and frank necrosis of the intestinal epithelium. Mice treated with GALNT1 were not protected from development of colitis as evidenced by similar histopathology. In contrast, mice treated with MFAP5 or LGALS3BP were protected from developing extensive colonic inflammation. Colons from MFAP5 and LGALS3BP treated animals exhibited only mild edema and minor foci of inflamed tissue.

[0076] FIG. 7. (A) MSC-CM was found to cause a significant decrease in IFN-γ production of the cultured leukocytes once stimulated with LPS. As also seen in this Figure, IFN-γ production of the leukocytes incubated with Fb-CM was similar in amount to using the same volume of RPMI medium as a control. In contrast, LPS-stimulated MSC-CM reduced IFN-γ production even lower than MSCs that had not received prior stimulation with LPS. These results indicated that MSCs secrete specific factors that decrease IFN-γ production from leukocytes in a manner that fit the prerequisites for our differential gene expression analysis. From the analysis performed in Example 2, HAPLN1 was identified and observed to independently reduce IFN-γ production from leukocytes when used in a purified, recombinant form. (B) These results indicated a dose-dependency of IFN-γ production over several orders of magnitude of diluted HAPLN1 in RPMI 1640. FIG. 7 also presents the identifying sequence of HAPLN1 found in MSC-CM by size separation liquid chromatography followed by mass spectrometry (bottom panel) (GGSDSDASLVITDLTLEDYGR, SEQ ID NO: 13).

[0077] FIG. 8: In vivo hit screen and survival study. (a) Schematic of the in vivo LPS assay. Proteins were administered intraperitoneal (IP) at the concentration that elicited the strongest effect in vitro, followed by IP administration of LPS in conjunction with a second dose of the proteins 16 hours later. Two days after the combined LPS and second protein dose, the mice were sacrificed and assessed for changes in serum cytokines and tissue histology. (b) Serum IL-10 levels of BALB/cJ mice subjected to the in vivo LPS assay. * p<0.001 compared to saline. (c) Serum TNF-α levels of BALB/cJ mice subjected to the in vivo LPS assay. * p<0.001 compared to saline, ** p<0.05 compared to BMSC-CM. (d) Representative micrographs of lung tissue from mice subjected to the in vivo LPS assay stained with hematoxylin and eosin. (e) Survival of mice subjected to a lethal dose of LPS i.p. (350 μg) concurrently with i.p. saline vehicle (bold dark blue line), 5 μg Anti-TNF-α antibody (thin dark blue line), 4 μg PENK (bold light blue line) or 4 μg MFAP5 (thin light blue line). Scale bar=200 μm.

[0078] FIG. 9. Listing of SEQ ID numbers for exemplary sequences of TFPI2, HAPLN1, PCOLCE2, FNDC1, LIF, MFAP5, INHBA, SRGN, CRISPLD1, ADAMTSL1, PENK, CDCP1, GALNT1, CRLF1, CFH, FN1, SERPINE1, HBEGF, LGALS3BP, BMP2, IGFBP1, and APOL1. This figure also presents exemplary entrez gene numbers encoding for provided polypeptides.

### DESCRIPTION OF CERTAIN EMBODIMENTS

### Bone Marrow Stromal Cell Factors

[0079] Therapeutic benefits observed when MSCs are transplanted can be completely recapitulated, and in some cases improved upon, by administration of MSC-conditioned supernatants. This finding is consistent with the observation that suppression in most MSC-immune cell co-culture studies can be reproduced in the absence of cell-cell contact and in a dose-dependent manner.

[0080] MSC-conditioned supernatants have no anti-proliferative effect on T cells, yet are capable of suppressing the stimulation of B cells (Augello, Tasso et al. 2005). This finding suggests that MSCs can dynamically react to their immunological environment in the context of T cells, while also secreting immunomodulatory agents in their quiescent, undifferentiated state in the context of B cell development. Also, there is an approximate 1-2 order of magnitude difference between the number of MSCs needed to suppress T cell activity compared to B cell activity (Le Blanc 2003; Corcione, Benvenuto et al. 2006). These studies hint at the interesting dynamics and dosing of MSC-derived factors to consider when evaluating MSC therapeutic applications.

[0081] Which soluble mediators are involved in MSC therapy (reviewed in (van Poll, Parekkadan et al. 2008)), has remained a topic of significant debate, although a clear distinction can be made that some molecules are considered naturally secreted by MSCs and others are inducible. Many candidates such as hepatocyte growth factor (HGF), transforming growth factor β₁ (TGF-β₁), or the metabolic byproduct of indoleamine 2,3-dioxygenase (IDO) activity (Klyushnenkova, Mosca et al. 1998; Tse, Beyer et al. 2000; Di Nicola, Carlo-Stella et al. 2002; Le Blanc, Tammik et al. 2003; Meisel, Zibert et al. 2004; Aggarwal and Pittenger 2005) are basally secreted by these cells. However, stimulation of MSCs by toll-like receptor ligands or inflammatory cytokines causes an alteration of the MSC secretome and a different set of chemical species (Block, Ohkouchi et al. 2009; Yagi, Parekkadan et al. 2009). For example, LPS found in serum leads to the rapid upregulation of prostaglandin E₂ (PGE₂), likely through an immediate early gene response related to NF-κB. Recently, a direct correlation between the upregulation of an anti-inflammatory protein, TSG-6, upon engraftment of MSCs in the lungs and the recovery of myocardial function after infarction was demonstrated (Lee, Pulin et al. 2009). Nevertheless, despite extensive investigation into the most potent factors secreted by MSCs, none have been shown to elicit the same therapeutic response as transplanted MSCs. Many factors have been proposed to compose the majority of MSC therapeutic activity including HLA-G, IL-6, IL-1Rag, IL-10, PGE2, TGFβ, Gal-1, and HGF; however, none of these factors have been shown to possess sufficient activity to account for the therapeutic potency of MSCs (Pittenger 2009). Indeed, prior to the present disclosure, all previous approaches have been biased, and never has it been demonstrated or indeed hypothesized that MSCs secrete the polypeptides of GALNT1, LGALS3BP, MFAP5, HAPLN1, and/or PENK. Furthermore, the present disclosure encompasses the recognition and represents the first demonstration that these polypeptides, provided in isolated form (e.g., without MSCs and/or having been produced recombinantly or synthetically or otherwise than by MSCs) cause a change in cytokine secretion of immune cells when administered exogenously to a subject and/or have anti-inflammatory activity.

[0082] The present invention demonstrates, among other things, that certain factors that are naturally produced by marrow stromal cells that modulate cytokine production. The present invention identifies such factors, isolates and characterizes them, and demonstrates their activities. Those of ordinary skill in the art, reviewing the present specification, including the data and guidance provided herein, will readily appreciate that the present invention provides, for example, GALNT1 polypeptides, compositions containing them, nucleic acids encoding them (and/or complements of such nucleic acids), and/or methods or making or using such; LGALS3BP polypeptides, compositions containing them, nucleic acids encoding them (and/or complements of such nucleic acids), and/or methods or making or using such; MFAP5 polypeptides, compositions containing them, nucleic acids encoding them (and/or complements of such nucleic acids), and/or methods or making or using such; PENK polypeptides, compositions containing them, nucleic acids encoding them (and/or complements of such nucleic acids), and/or methods or making or using such; HAPLN1 polypeptides, compositions containing them, nucleic acids encoding them (and/or complements of such nucleic acids); and combinations thereof.

[0083] The present invention therefore provides particular factors (e.g., GALNT1 polypeptides, nucleic acids encoding them (and/or complements of such nucleic acids); LGALS3BP polypeptides, nucleic acids encoding them (and/or complements of such nucleic acids); MFAP5 polypeptides, nucleic acids encoding them (and/or complements of such nucleic acids); PENK polypeptides, nucleic acids encoding them (and/or complements of such nucleic acids); HAPLN1 polypeptides, nucleic acids encoding them (and/or complements of such nucleic acids); and combinations thereof).

[0084] GALNT1

[0085] Polypeptide N-acetylgalactosaminyltransferase 1 (GALNT1; a.k.a. GalNAc-T1) is a mucin-type O-linked glycosylation enzyme that is primarily active in the Golgi (White, Bennett et al. 1995). Unlike other members of the UDP-N-acetyl-alpha-D-galactosamine:polypeptide N-acetylgalactosaminyltransferase family of enzymes, GALNT1 is a secreted molecule with enzymatic activity to promote extracellular glycosylation. GALNT1 is a type II membrane protein, possessing a cytoplasmic N-terminal domain, a transmembrane domain, a stem domain and a catalytic domain (Imberty, Piller et al. 1997). The catalytic domain is thought to contain a Rossman-type nucleotide binding domain in addition to a lectin-binding domain (Breton, Oriol et al. 1996; Imberty, Piller et al. 1997). The enzymatic activity of GALNT1 is dependent on a region of conserved cysteines that are required for mucin-type O-linking of glycans (Tenno, Toba et al. 2002). Its enzymatic activity is significantly reduced in its secreted form, suggesting the possibility of alternative extracellular functions (Zhu, Allende et al. 1998). Of note, there are no instances describing any association of GALNT1 with the regulation or stimulation of inflammatory or anti-inflammatory mediators. The present invention demonstrates a causal role of exogenously delivered GALNT1 in the treatment of immune diseases by an anti-inflammatory mechanism. One specific example is presented in colitis. The present invention therefore provides GALNT1 polypeptides, and various related compositions and methods.

[0086] LGALS3BP Polypeptides

[0087] Soluble galectin 3 binding protein (LGALS3BP; a.k.a. 90K, Mac2 binding protein, CyCAP) is a highly glycosylated secreted protein which binds galectin-1, galectin-3 and galectin-7 (Rosenberg, Cherayil et al. 1991). It is synthesized and secreted by different cell types, including hematopoietic cells and glandular or mucosal epithelia (Koths, Taylor et al. 1993; Ullrich, Sures et al. 1994) and is present in the serum and other biologic fluids of normal subjects in the μg/ml range (D'Ostilio, Sabatino et al. 1996). The present disclosure establishes, among other things, that a human mesenchymal cell secretes LGALS3BP.

[0088] LGALS3BP is one member of the scavenger receptor cysteine-rich domain superfamily that includes CD5, CD6, M130, complement factor 1, WC1, and other proteins that are structurally reminiscent of immunoglobulins (Resnick, Pearson et al. 1994). Under non-dissociative conditions and at neutral pH, LGALS3BP exists as on oligomer of multiple units that aggregate to form a collective mass that ranges of 1000-1500 kDa (Sasaki, Brakebusch et al. 1998). One individual 97 kDa subunit may be catalytically cleaved into 70 and 27 kDa fragments. It is glycosylated at a number of sites which may be critical to its bioactivity as well as its ability to be solubilized in different mediums such as serum or breast milk.

[0089] Based on the role of galectins in cell-cell and cell-matrix interactions, LGALS3BP has been associated with diseases in mammals that involve these interactions (Sasaki, Brakebusch et al. 1998). LGALS3BP is elevated in patients with cancer and viral infections, where in many instances its serum level has been found to be independent and inversely correlated of survival (Marchetti, Tinari et al. 2002). Clinical manifestation of pouchitis is inversely correlated with galectin-3 expression in the pouches' subepithelial lamina propria macrophages (Brazowski, Dotan et al. 2009).

[0090] A knockout mouse for LGALS3BP exists (Trahey and Weissman 1999) and has been found to spontaneously develop colonic mucosal hyperplasia and exaggerated tumorigenesis after treatment with carcinogen azoxymethane (Torlakovic, Keeler et al. 2009). Its role in inflammatory diseases has been controversial. Some have reported that it may be a potentiator of an immune response (Ullrich, Sures et al. 1994).

[0091] The present disclosure demonstrates a causal role of exogenously delivered LGALS3BP in the treatment of immune diseases by an anti-inflammatory mechanism. One specific example is presented in colitis. The present invention therefore provides LGALS3BP polypeptides, and various related compositions and methods.

[0092] MFAP5

[0093] Microfibrillar-associated protein 5 (MFAP5; a.k.a. microfibril-associated glycoprotein-2, MAGP-2) is an ECM glycoprotein localized to microfibrils and associated with elastin networks. It is a highly hydrophilic molecule consisting of two distinct domains: a cysteine-free acidic N-terminal half, and a cysteine-rich basic C-terminal half. It has been found to have significant homology (57%) with MFAP2 (MAPG-1) (Gibson, Hatzinikolas et al. 1996), in particular with respect to the cysteine rich region. A series of 7 cysteines near to the center of both molecules precisely align when their sequences are compared, and the cysteine separation distances are highly conserved. MFAP5 binds fibrillin-1 and -2 at the C-terminus, as well as to other proteins containing EGF-like repeats (Penner, Rock et al. 2002). It contains an RGD integrin-binding motif and has been shown to bind integrin (Gibson, Leavesley et al. 1999). MFAP5 has been shown to interact with the Notch receptor pathway (Miyamoto, Lau et al. 2006). Conflicting accounts describe this interaction as inhibitory (Albig, Becenti et al. 2008), and activating (Miyamoto, Lau et al. 2006), so the mechanisms by which MFAP5 binds Notch and instigates downstream signaling are yet unknown. Of note, to-date there have been no accounts of MFAP5 influencing immune processes, and its connection to human disease has not been established. Most importantly, a causal relationship between MFAP5 and the suppression of inflammation has never been previously demonstrated nor hypothesized.

[0094] The present disclosure demonstrates a causal role of exogenously delivered MFAP5 in the treatment of immune diseases by an anti-inflammatory mechanism. One specific example is presented in colitis. The present invention therefore provides MFAP5 polypeptides, and various related compositions and methods.

[0095] PEA

[0096] Proenkephalin A (Penk; a.k.a. PEA) is the precursor of the enkephalin opioid peptides and is proteolytically processed to yield Met-enkephalin, Leu-enkephalin, Met-enkephalin-Arg-Phe, Metenkephalin-Arg-Gly-Leu, enkelytin and PENK-derived peptides (Table 1) (Metz-Boutigue, Kieffer et al. 2003).

TABLE 1
Products of proenkephalin (PENK)

| Name | Amino Acid Sequence | MW (da) |
|---|---|---|
| Met-enkephalin | Tyr-Gly-Gly-Phe-Met (SEQ ID NO. 14) | 576 |
| Leu-enkephalin | Tyr-Gly-Gly-Phe-Leu (SEQ ID NO. 15) | 554 |
| Peptide F (human) | Tyr-Gly-Gly-Phe-Met-Lys-Lys-Met-Asp-Glu-Leu- | 3846 |
| | Tyr-Pro-Met-Glu-Pro-Glu-Glu-Glu-Ala-Asn-Gly-Ser- | |
| | Glu-ne-Leu-Ala-Lys-Arg-Tyr-Gly-Gly-Phe-Met (SEQ | |
| | ID NO. 16) | |
| Peptide E (human and | Tyr-Gly-Gly-Phe-Met-Arg-Arg-Val-Gly-Arg-Pro-Glu- | 3157 |
| bovine) | Trp-Trp-Met-Asp-Tyr-Gln-Lys-Arg-Tyr-Gly-Gly-Phe- | |
| | Leu (SEQ ID NO. 17) | |
| Peptide B (human) | Phe-Ala-Glu-Ala-Leu-Pro-Ser-Asp-Glu-Glu-Gly-Glu- | 3655 |
| | Ser-Tyr-Ser-Lys-Glu-Val-Pro-Glu-Met-Glu-Lys-Arg- | |
| | Tyr-Gly-Gly-Phe-Met-Arg-Phe (SEQ ID NO. 18) | |

[0097] Cleavage of PENK by proteases takes place at dibasic, lysine-lysine, amino acid residues. It is expressed in specific sites in the brain and certain cells of the adrenal medulla and the immune system, which is increased at the gene expression level in response to inflammation (Behar, Ovadia et al. 1994). The physiological relevance of the responsiveness of the PENK gene in these sites remains unclear. The concentration of PENK-derived peptides in the unstimulated bovine adrenal medulla exceeds 200 μg per gram of granule protein in secretory vesicles of chromaffin cells (Hook, Noctor et al. 1999). It is worthwhile to note that, except in the setting of meningococcemia, inflammation of the adrenal gland is a medical rarity. Peptides with antimicrobial activity but no known neuropeptide function have been identified in the adrenal medullary chromaffin cell discharge. They include enkelytin and peptide B from PENK (Goumon, Lugardon et al. 1998). The present disclosure demonstrates that a human mesenchymal cell basally secretes PENK and/or PENK-derived peptides, and upregulates this secretion under inflammatory stimuli.

[0098] Investigators have proposed that PENK contains neuropeptides, antibacterial peptides, and immune stimulatory peptides (Salzet and Tasiemski 2001). The effects of enkephalins on various activities of immune cells (chemotaxis, cytotoxicity, immunoglobulin synthesis), which bear opioid receptors, have been described. However, there have been no reports of PENK altering cytokine secretion from immune cells when administered directly in a purified form (Sharp, Roy et al. 1998). One study using PENK-deficient mice reported that T cells could produce IFN-γ and TNF-α but not IL-4 or IL-10 (Weir, McNeill et al. 2006). However, the study did not show a causal link between PENK and these cytokines.

[0099] The present disclosure demonstrates a causal role of exogenously delivered PENK in the treatment of immune diseases by an anti-inflammatory mechanism. One specific example is presented in colitis. The present invention therefore provides LGALS3BP polypeptides, and various related compositions and methods

[0100] HAPLN1

[0101] HAPLN1 (a.k.a. Cartilage-linking protein 1, Cartilage-link protein, CRTL1, Hyaluronan and proteoglycan link protein 1, Proteoglycan link protein) is a glycosylated protein associated with the extracellular matrix (ECM). It is one of a family of four HAPLN molecules, all implicated in the structural formation of extracellular matrix (Spicer, Joo et al. 2003). Members of the family of HAPLN proteins are similar in structure, and share anywhere from 45-52% homology. HAPLN1 also shares significant homology with versican (a.k.a. chondroitin sulfate proteoglycan core protein 2 (CSPG2), chondroitin sulfate proteoglycan 2 (CSPG2) and PG-M). HAPLN1 (a.k.a. Hyaluronan and proteoglycan link protein 1; cartilage link protein; versican core protein) is a link protein that aggregates hyaluronan (HA) and chondroitin sulfate proteoglycans (CSPG) in a 1:1:1 ratio. These HA-CSPG aggregates have been reported to bind to CD44, EGF receptors, sulfated glycolipids, tenascins, fibulins, and neural cell adhesion molecule (Neame, Christner et al. 1986; Barta, Deak et al. 1993). The protein is organized with an N-terminal signal sequence followed by an Ig domain (binds to CSPG), and two consecutive proteoglycan tandem repeat regions.

[0102] HAPLN1 is reported to be restricted in expression to the small intestine and placenta primarily. HAPLN1 has been shown to be significantly upregulated in the context of certain cancers, and overexpression of the molecule has been linked with tumorigenicity of mesothelioma and invasiveness of breast cancer (Auvinen, Tammi et al. 2000; Ivanova, Goparaju et al. 2009). The present disclosure describes HAPLN1 expression and production in human mesenchymal cells derived from the bone marrow. HAPLN1, in addition to HAPLN2, HAPLN3 and HAPLN4, have been shown to share structural characteristics to the anti-inflammatory molecule TSG-6 (Blundell, Mahoney et al. 2003). However, no reports exist that demonstrate any association between HAPLN1 and immune processes. In particular, no association has been made between HAPLN1 and a reduction in IFN-γ from stimulated leukocytes as is described herein.

[0103] In some embodiments, provided polypeptides have immunomodulatory properties. In some embodiments, provided polypeptides are characterized by an ability, when contacted with mammalian leukocytes in culture, to alter production of at least one pro-inflammatory or anti-inflammatory agent by the mammalian leukocytes. In some embodiments, mammalian leukocytes are leukocytes that have been stimulated by a pro-inflammatory mediator (for example, but not limited to, lipopolysaccharide (LPS), DNA, RNA, bacterial products, viral products, non-human products, human products, toxins, chemicals, interleukin-1-α, interleukin-1-β, interleukin-6, tumor necrosis factor-α, leukemia inhibitory factor, interferon-γ, other interferons, oncostatin M, ciliary neurotrophic factor, granulocyte-macrophage colony-stimulating factor, interleukin-11, interleukin-12, interleukin-17, interleukin-18, interleukin-8, and/or combinations thereof). In some embodiments, mammalian leukocytes are leukocytes that have been stimulated by an anti-inflammatory mediator (for example, but not limited to, steroids, non-steroidal anti-inflammatory drugs, interleukin-10, TGF-β, interleukin-1 receptor antagonist, interleukin-1 soluble receptor, tumor necrosis factor-α soluble receptors I and II, interleukin-4, interleukin-6, interleukin-11, interleukin-13, interleukin-16, interleukin-18 soluble receptor, atrial natriuretic peptide, interleukin-6 soluble receptor, and/or combinations thereof). In some embodiments, mammalian leukocytes are naïve leukocytes in that that they have not been stimulated by a pro-inflammatory mediator. In some embodiments, mammalian leukocytes are naïve leukocytes in that that they have not been stimulated by an anti-inflammatory mediator. In some such embodiments, production is altered at least 10%, at least 20%, at least 30%, at least 40%, at least 50%, at least 100%, at least 150%, at least 200%, at least 250%, at least 300%, at least 350%, at least 400%, at least 450%, at least 500%, or more. In some such embodiments, production is altered at least 1.5 fold, at least 2 fold, at least 2.5 fold, at least 3 fold, at least 3.5 fold, at least 4 fold, at least 4.5 fold, at least 5 fold, at least 5.5 fold, at least 6 fold, at least 6.5 fold, at least 7 fold, at least 7.5 fold, at least 8 fold, at least 8.5 fold, at least 9 fold, at least 9.5 fold, at least 10 fold, or more. In some such embodiments, production is increased. In some such embodiments, production is inhibited. In some such embodiments the at least one agent is a pro-inflammatory agent. In some such embodiments, the at least one agent is an anti-inflammatory agent. In some such embodiments, the at least one pro-inflammatory agent is selected from the group consisting of interleukin-1-α, interleukin-1-β, interleukin-6, tumor necrosis factor-α, leukemia inhibitory factor, interferon-γ, other interferons, oncostatin M, ciliary neurotrophic factor, granulocyte-macrophage colony-stimulating factor, interleukin-11, interleukin-12, interleukin-17, interleukin-18 and interleukin-8, and combinations thereof. In some such embodiments, the at least one anti-inflammatory agent is selected from the group consisting of interleukin-10, TGF-β, interleukin-1 receptor antagonist, interleukin-1 soluble receptor, tumor necrosis factor-α soluble receptors I and II, interleukin-4, interleukin-6, interleukin-11, interleukin-13, interleukin-16, interleukin-18 soluble receptor, atrial natriuretic peptide, interleukin-6 soluble receptor and combinations thereof; in some such embodiments, the at least one anti-inflammatory agent is or includes IL-10.

[0104] In some embodiments, provided factors are characterized in that, when one or more is/are administered to colitic mice, one or more features of their colitis is/are attenuated.

[0105] In some embodiments, provided factors are characterized in that, consistent with studies of MSC activities (see, for example, (Djouad, Plence et al. 2003; Liu, Lu et al. 2004) which report on suppression of MLRs in xenogeneic cultures), they exert their effects across species barriers.

### Antibodies and Receptors

[0106] Having identified and provided particular marrow stromal cell factors, the present invention provides antibodies and receptors that bind specifically to such factors (e.g., to include one or more products of GALNT1, LGALS3BP, MFAP5, HAPLN¹, and/or PENK genes). For example, in some embodiments, antibodies and/or receptors bind specifically to provided marrow stromal cell factors such as GALNT1 polypeptides, nucleic acids encoding them (and/or complements of such nucleic acids); LGALS3BP polypeptides, nucleic acids encoding them (and/or complements of such nucleic acids); MFAP5 polypeptides, nucleic acids encoding them (and/or complements of such nucleic acids); PENK polypeptides, nucleic acids encoding them (and/or complements of such nucleic acids); HAPLN1 polypeptides, nucleic acids encoding them (and/or complements of such nucleic acids); and/or combinations thereof. In many embodiments, provided antibodies bind specifically to polypeptides.

[0107] The present invention also provides compositions containing such antibodies and/or receptors (individually or together with provided polypeptides), methods of identifying, characterizing, and/or producing such antibodies and/or receptors, and/or methods of using such antibodies and/or receptors (e.g., in research, diagnostic, and/or therapeutic applications).

### Pharmaceutical Compositions

[0108] In general, a pharmaceutical composition comprises an active agent (e.g., a provided marrow stromal cell factor and/or antibody and/or receptor thereto) and one or more pharmaceutically acceptable carriers or excipients. Typically, the active agent is present in a therapeutically effective amount.

[0109] In some embodiments of the present invention, a pharmaceutical composition comprises a provided marrow stromal cell factor (and/or antibody and/or receptor thereto) in an amount sufficient to alter cytokine production by leukocytes in culture. For example, in some embodiments, a pharmaceutical composition comprises a provided marrow stromal cell factor (and/or antibody and/or receptor) in an amount sufficient to alter production of at least one inflammatory or anti-inflammatory agent by mammalian leukocytes. In some such embodiments, production is altered at least 10%, at least 20%, at least 30%, at least 40%, at least 50%, at least 100%, at least 150%, at least 200%, at least 250%, at least 300%, at least 350%, at least 400%, at least 450%, at least 500%, or more. In some such embodiments, production is altered at least 1.5 fold, at least 2 fold, at least 2.5 fold, at least 3 fold, at least 3.5 fold, at least 4 fold, at least 4.5 fold, at least 5 fold, at least 5.5 fold, at least 6 fold, at least 6.5 fold, at least 7 fold, at least 7.5 fold, at least 8 fold, at least 8.5 fold, at least 9 fold, at least 9.5 fold, at least 10 fold, or more. In some such embodiments, production is increased. In some such embodiments, production is inhibited. In some such embodiments the at least one cytokine is a pro-inflammatory cytokine. In some such embodiments, the at least one cytokine is an anti-inflammatory agent. In some such embodiments, the at least one pro-inflammatory agent is selected from the group consisting of interleukin-1-α, interleukin-1-β, interleukin-6, tumor necrosis factor-α, leukemia inhibitory factor, interferon-γ, other interferons, oncostatin M, ciliary neurotrophic factor, granulocyte-macrophage colony-stimulating factor, interleukin-11, interleukin-12, interleukin-17, interleukin-18 and interleukin-8, and combinations thereof. In some such embodiments, the at least one anti-inflammatory agent is selected from the group consisting of interleukin-10, TGF-β, interleukin-1 receptor antagonist, interleukin-1 soluble receptor, tumor necrosis factor-α soluble receptors I and II, interleukin-4, interleukin-6, interleukin-11, interleukin-13, interleukin-16, interleukin-18 soluble receptor, atrial natriuretic peptide, interleukin-6 soluble receptor and combinations thereof in some such embodiments, the at least one anti-inflammatory agent is or includes IL-10.

[0110] In some embodiments of the present invention, a pharmaceutical composition comprises two or more provided polypeptide products of the genes in Table 2 in combination (and/or antibody and/or receptor thereto) in an amount sufficient to alter cytokine production by leukocytes in culture.

TABLE 2
Representative sequences of GALNT1, LGALS3BP, MFAP5 and PENK polypeptides

| Protein | Exemplary Sequence | GenBank | NCBI RefSeq |
|---|---|---|---|
| GALNT1 | MRKFAYCKVVLATSLIWVLLDMFLLL | AAH47746.1, | NP_065207.2, |
| | YFSECNKCDEKKERGLPAGDVLEPVQ | AAH38440.1 | NP_001153876.1, |
| | KPHEGPGEMGKPVVIPKEDQEKMKEM | | NP_038842.3 |
| | FKINQFNLMASEMIALNRSLPDVRLEG | | |
| | (SEQ ID NO. 19) | | |
| LGALS3BP | MTPPRLFWVWLLVAGTQGVNDGDMR | CAM23109.1, | NP_005558.1, |
| | LADGGATNQGRVEIFYRGQWGTVCDN | AAA36193.1 | NP_035280.1. |
| | LWDLTDASVVCRALGFENATQALGRA | | |
| | AFGQGSGPIMLDEVQCTGTEASLADCK | | |
| | SLGWLKSNCRHERDAGVVCTNETRST | | |
| | HTLDLSRELSEALGQIFDSQRGCDLSIS | | |
| | VNVQGEDALGFCGHTVILTANLEAQA | | |
| | LWKEPGSNVTMSVDAECVPMVRDLLR | | |
| | YFYSRRIDITLSSVKCFHKLASAYGAR | | |
| | QLQGYCASLFAILLPQDPSFQMPLDLY | | |
| | AYAVATGDALLEKLCLQFLAWNFEAL | | |
| | TQAEAWPSVPTDLLQLLLPRSDLAVPS | | |
| | ELALLKAVDTWSWGERASHEEVEGLV | | |
| | EKIRFPMMLPEELFELQFNLSLYWSHE | | |
| | ALFQKKTLQALEFHTVPFQLLARYKGL | | |
| | NLTEDTYKPRIYTSPTWSAFVTDSSWS | | |
| | ARKSQLVYQSRRGPLVKYSSDYFQAPS | | |
| | DYRYYPYQSFQTPQHPSFLFQDKRVS | | |
| | WSLVYLPTIQSCWNYGFSCSSDELPVL | | |
| | GLTKSGGSDRTIAYENKALMLCEGLFV | | |
| | ADVTDFEGWKAATPSALDTNSSKSTSS | | |
| | FPCPAGHFNGFRTVIRPFYLTNSSGVD | | |
| | (SEQ ID NO. 20) | | |
| MFAP5 | MSLLGPKVLLFLAAFIITSDWIPLGVNS | AAH05901.1, | NP_056591.1, |
| | QRGDDVTQATPETFTEDPNLVNDPAT | AAA96752.1, | NP_003471.1 |
| | DETVLAVLADIAPSTDDLASLSEKNTT | AAD53950.1 | |
| | AECWDEKFTCTRLYSVHRPVKQCIHQ | | |
| | LCFTSLRRMYIVNKEICSRLVCKEHEA | | |
| | MKDELCRQMAGLPPRRLRRSNYFRLP | | |
| | PCENVDLQRPNGL (SEQ ID NO. 21) | | |
| PENK | MARFLTLCTWLLLLGPGLLATVRAECS | CAG46627.1, | NP_001129162.1, |
| | QDCATCSYRLVRPADISFLACVMECEG | CAG46607.1, | NP_006202.1, |
| | KLPSLKIWETCKELLQLSRPELPQDGTS | AAI07707.1 | NP_001002927.1 |
| | TLRENSKPEESHLLAKRYGGFMKRYG | | |
| | GFMKKMDELYPMEPEEEANGSEILAK | | |
| | RYGGFMKKDAEEDDSLANSSDLLKEL | | |
| | LETGDNRERSHHQDGSDNEEEVSKRY | | |
| | GGFMRGLKRSPQLEDEAKELQKRYGG | | |
| | FMRRVGRPEWWMDYQKRYGGFLKRF | | |
| | AEALPSDEEGESYSKEVPEMEKRYGGF | | |
| | MRF (SEQ ID NO. 22) | | |
| HAPLN1 | MKSLLLLVLISICWADHLSDNYTLDHD | AAH57808.1 | NP_001875.1 |
| | RAIHIQAENGPHLLVEAEQAKVFSHRG | AAI51456.1 | NP_038528.3 |
| | GNVTLPCKFYRDPTAFGSGIHKIRIKWT | | |
| | KLTSDYLKEVDVFVSMGYHKKTYGG | | |
| | YQGRVFLKGGSDSDASLVITDLTLEDY | | |
| | GRYKCEVIEGLEDDTVVVALDLQGVV | | |
| | FPYFPRLGRYNLNFHEAQQACLDQDA | | |
| | VIASFDQLYDAWRGGLDWCNAGWLS | | |
| | DGSVQYPITKPREPCGGQNTVPGVRNY | | |
| | GFWDKDKSRYDVFCFTSNFNGRFYYLI | | |
| | HPTKLTYDVAVQACLNDGAQIAKVGQ | | |
| | IFAAWKILGYDRCDAGWLADGSVRYP | | |
| | ISRPRRRCSPTEAAVRFVGFPDKKHKL | | |
| | YGVYCFRAYN (SEQ ID NO. 23) | | |

[0111] For example, in some embodiments, a pharmaceutical composition comprises a combination of two or more provided polypeptides (and/or antibody and/or receptor) in an amount sufficient to alter production of at least one inflammatory or anti-inflammatory agent by mammalian leukocytes. In some embodiments, mammalian leukocytes are leukocytes that have been stimulated by a pro-inflammatory mediator (for example, but not limited to, lipopolysaccharide (LPS), DNA, RNA, bacterial products, viral products, non-human products, human products, toxins, chemicals, interleukin-1-α, interleukin-1-β, interleukin-6, tumor necrosis factor-α, leukemia inhibitory factor, interferon-γ, other interferons, oncostatin M, ciliary neurotrophic factor, granulocyte-macrophage colony-stimulating factor, interleukin-11, interleukin-12, interleukin-17, interleukin-18, interleukin-8, and/or combinations thereof). In some embodiments, mammalian leukocytes are leukocytes that have been stimulated by an anti-inflammatory mediator (for example, but not limited to, steroids, non-steroidal anti-inflammatory drugs, interleukin-10, TGF-β, interleukin-1 receptor antagonist, interleukin-1 soluble receptor, tumor necrosis factor-α soluble receptors I and II, interleukin-4, interleukin-6, interleukin-11, interleukin-13, interleukin-16, interleukin-18 soluble receptor, atrial natriuretic peptide, interleukin-6 soluble receptor, and/or combinations thereof). In some embodiments, mammalian leukocytes are naïve leukocytes in that that they have not been stimulated by a pro-inflammatory mediator. In some embodiments, mammalian leukocytes are naïve leukocytes in that that they have not been stimulated by an anti-inflammatory mediator. In some such embodiments, production is altered at least 10%, at least 20%, at least 30%, at least 40%, at least 50%, at least 100%, at least 150%, at least 200%, at least 250%, at least 300%, at least 350%, at least 400%, at least 450%, at least 500%, or more. In some such embodiments, production is altered at least 1.5 fold, at least 2 fold, at least 2.5 fold, at least 3 fold, at least 3.5 fold, at least 4 fold, at least 4.5 fold, at least 5 fold, at least 5.5 fold, at least 6 fold, at least 6.5 fold, at least 7 fold, at least 7.5 fold, at least 8 fold, at least 8.5 fold, at least 9 fold, at least 9.5 fold, at least 10 fold, or more. In some such embodiments, production is increased. In some such embodiments, production is inhibited. In some such embodiments the at least one agent is a pro-inflammatory agent. In some such embodiments, the at least one agent cytokine is an anti-inflammatory agent. In some such embodiments, the at least one pro-inflammatory agent is selected from the group consisting of interleukin-1-α, interleukin-1-β, interleukin-6, tumor necrosis factor-α, leukemia inhibitory factor, interferon-γ, other interferons, oncostatin M, ciliary neurotrophic factor, granulocyte-macrophage colony-stimulating factor, interleukin-11, interleukin-12, interleukin-17, interleukin-18 and interleukin-8, and combinations thereof. In some such embodiments, the at least one anti-inflammatory molecule is selected from the group consisting of interleukin-10, TGF-β, interleukin-1 receptor antagonist, interleukin-1 soluble receptor, tumor necrosis factor-α soluble receptors I and II, interleukin-4, interleukin-6, interleukin-11, interleukin-13, interleukin-16, interleukin-18 soluble receptor, atrial natriuretic peptide, interleukin-6 soluble receptor and combinations thereof; in some such embodiments, the at least one anti-inflammatory molecule is or includes IL-10.

[0112] In some embodiments, pharmaceutical compositions comprise a provided factor and/or a combination of two or more (and/or antibody and/or receptor thereto) in an amount such that, when the pharmaceutical compositions are administered to colitic mice, one or more features of their colitis is/are attenuated.

[0113] In some embodiments, pharmaceutical compositions comprise a provided factor and/or a combination of two or more (and/or receptor thereto) at concentrations comparable to those at which such factors (and/or receptors) are naturally found in human serum.

[0114] In some embodiments, pharmaceutical compositions comprise a provided factor and/or a combination of two or more (and/or receptor thereto) in an amount within two orders of magnitude of 10 μg/mL.

[0115] Pharmaceutical compositions in accordance with the present invention may be formulated for any appropriate route of administration. For example, compositions may be formulated for intravenous, parenteral, subcutaneous, intramuscular, intracranial, intraorbital, ophthalmic, intraventricular, intracapsular, intraspinal, intracistemal, intraperitoneal, intranasal, or aerosol administration. In some embodiments, pharmaceutical compositions are formulated for oral delivery. In some embodiments, pharmaceutical compositions are formulated for parenteral delivery. For treatment of rheumatoid arthritis, in particular, intra-articular administration is specifically contemplated along with other appropriate routes.

[0116] Pharmaceutical compositions may be in the form of liquid solutions or suspensions (as, for example, for intravenous administration, for oral administration, etc.). Alternatively, pharmaceutical compositions may be in solid form (e.g., in the form of tablets or capsules, for example for oral administration). In some embodiments, pharmaceutical compositions may be in the form of powders, drops, aerosols, etc.

[0117] Methods and agents well known in the art for making formulations are described, for example, in “Remington's Pharmaceutical Sciences,” Mack Publishing Company, Easton, Pa. Formulations for parenteral administration may, for example, contain excipients, sterile water, or saline, polyalkylene glycols such as polyethylene glycol, oils of vegetable origin, or hydrogenated napthalenes.

[0118] If desired, slow release or extended release delivery systems may be utilized. Biocompatible, biodegradable lactide polymer, lactide/glycolide copolymer, or polyoxyethylene-polyoxypropylene copolymers may be used to control the release of the compounds. Other potentially useful parenteral delivery systems include ethylene-vinyl acetate copolymer particles, osmotic pumps, implantable infusion systems, and liposomes. Formulations for inhalation may contain excipients, for example, lactose, or may be aqueous solutions containing, for example, polyoxyethylene-9-lauryl ether, glycocholate and deoxycholate, or may be oily solutions for administration in the form of nasal drops, or as a gel.

[0119] As described herein, pharmaceutical compositions are formulated to contain a dose of active agent appropriate to the effect to be achieved and are typically administered in unit dosage form. An effective quantity of the purified molecules or molecular mixtures is employed to treat the diseases or conditions described herein. The exact dosage of a molecule or molecular mixture may be dependent, for example, upon the age and weight of the recipient, the route of administration, and the severity and nature of the disease or condition to be treated. In general, the dosage selected should be sufficient to prevent, ameliorate, or treat the disease or condition, or one or more symptoms thereof, without producing significant toxic or undesirable side effects.

### Uses

[0120] Marrow stromal cell factors (e.g., polypeptides as described herein), antibodies and receptors thereto, and compositions as described herein have a variety of uses, many of which will be readily apparent to those of ordinary skill in the art reading the present disclosure. Such uses include various research-related uses, diagnostic uses, and/or therapeutic uses.

[0121] To give but a few examples, now that particular marrow stromal cell factors (e.g., polypeptides as described herein) polypeptides have been identified in accordance with the present invention, those of ordinary skill in the art will appreciate that they can be used as reagents against which the performance or identity of other factors is compared.

[0122] Alternatively or additionally, antibodies and receptors to such factors can be used to characterize the factors, including for example measuring levels (e.g., levels of one or more of provided factors in different patients, organs, tissues, and/or cell types, etc.), affinities (e.g., binding affinities, etc.). In some embodiments, characterization assays are performed in vivo. In some embodiments, characterization assays are performed in vitro. In some embodiments, characterization assays are performed using cells that have been pre-stimulated with at least one pro-inflammatory mediator (for example, but not limited to, lipopolysaccharide (LPS), DNA, RNA, bacterial products, viral products, non-human products, human products, toxins, chemicals, interleukin-1-α, interleukin-1-β, interleukin-6, tumor necrosis factor-α, leukemia inhibitory factor, interferon-γ, other interferons, oncostatin M, ciliary neurotrophic factor, granulocyte-macrophage colony-stimulating factor, interleukin-11, interleukin-12, interleukin-17, interleukin-18, interleukin-8, and/or combinations thereof). In some embodiments, characterization assays are performed using cells that have not been pre-stimulated with at least one pro-inflammatory mediator (for example, but not limited to, lipopolysaccharide (LPS), DNA, RNA, bacterial products, viral products, non-human products, human products, toxins, chemicals, interleukin-1-α, interleukin-1-β, interleukin-6, tumor necrosis factor-α, leukemia inhibitory factor, interferon-γ, other interferons, oncostatin M, ciliary neurotrophic factor, granulocyte-macrophage colony-stimulating factor, interleukin-11, interleukin-12, interleukin-17, interleukin-18, interleukin-8, and/or combinations thereof). In some embodiments, characterization assays are performed using cells that have been pre-stimulated with at least one anti-inflammatory mediator (for example, but not limited to, lipopolysaccharide (LPS), DNA, RNA, bacterial products, viral products, non-human products, human products, toxins, chemicals, interleukin-1-α, interleukin-1-β, interleukin-6, tumor necrosis factor-α, leukemia inhibitory factor, interferon-γ, other interferons, oncostatin M, ciliary neurotrophic factor, granulocyte-macrophage colony-stimulating factor, interleukin-11, interleukin-12, interleukin-17, interleukin-18, interleukin-8, and/or combinations thereof). In some embodiments, characterization assays are performed using cells that have not been pre-stimulated with at least one anti-inflammatory mediator (for example, but not limited to, lipopolysaccharide (LPS), DNA, RNA, bacterial products, viral products, non-human products, human products, toxins, chemicals, interleukin-1-α, interleukin-1-β, interleukin-6, tumor necrosis factor-α, leukemia inhibitory factor, interferon-γ, other interferons, oncostatin M, ciliary neurotrophic factor, granulocyte-macrophage colony-stimulating factor, interleukin-11, interleukin-12, interleukin-17, interleukin-18, interleukin-8, and/or combinations thereof).

[0123] Still further, the present invention provides systems for detecting levels of provided factors, for example to assess whether a sample containing such factors has therapeutic potential. In some embodiments, a sample to be assessed comprises one or more marrow stromal cells. In some embodiments, a sample to be assessed is or comprises a pharmaceutical formulation. For example, in some embodiments, the present invention provides systems of evaluating and/or confirming quality of a proposed therapeutic sample by detecting levels of one or more provided factors in the sample and determining, for example based on the detected level, that the sample is or is not likely to have therapeutic potential because it does or does not contain a requisite level of marrow stromal cell factor as described herein. In some embodiments, detection assays are performed using cells that have been pre-stimulated with at least one pro-inflammatory mediator (for example, but not limited to, lipopolysaccharide (LPS), DNA, RNA, bacterial products, viral products, non-human products, human products, toxins, chemicals, interleukin-1-α, interleukin-1-β, interleukin-6, tumor necrosis factor-α, leukemia inhibitory factor, interferon-γ, other interferons, oncostatin M, ciliary neurotrophic factor, granulocyte-macrophage colony-stimulating factor, interleukin-11, interleukin-12, interleukin-17, interleukin-18, interleukin-8, and/or combinations thereof). In some embodiments, detection assays are performed using cells that have not been pre-stimulated with at least one pro-inflammatory mediator (for example, but not limited to, lipopolysaccharide (LPS), DNA, RNA, bacterial products, viral products, non-human products, human products, toxins, chemicals, interleukin-1-α, interleukin-1-β, interleukin-6, tumor necrosis factor-α, leukemia inhibitory factor, interferon-γ, other interferons, oncostatin M, ciliary neurotrophic factor, granulocyte-macrophage colony-stimulating factor, interleukin-11, interleukin-12, interleukin-17, interleukin-18, interleukin-8, and/or combinations thereof). In some embodiments, detection assays are performed using cells that have been pre-stimulated with at least one anti-inflammatory mediator (for example, but not limited to, lipopolysaccharide (LPS), DNA, RNA, bacterial products, viral products, non-human products, human products, toxins, chemicals, interleukin-1-α, interleukin-1-β, interleukin-6, tumor necrosis factor-α, leukemia inhibitory factor, interferon-γ, other interferons, oncostatin M, ciliary neurotrophic factor, granulocyte-macrophage colony-stimulating factor, interleukin-11, interleukin-12, interleukin-17, interleukin-18, interleukin-8, and/or combinations thereof). In some embodiments, detection assays are performed using cells that have not been pre-stimulated with at least one anti-inflammatory mediator (for example, but not limited to, lipopolysaccharide (LPS), DNA, RNA, bacterial products, viral products, non-human products, human products, toxins, chemicals, interleukin-1-α, interleukin-1-β, interleukin-6, tumor necrosis factor-α, leukemia inhibitory factor, interferon-γ, other interferons, oncostatin M, ciliary neurotrophic factor, granulocyte-macrophage colony-stimulating factor, interleukin-11, interleukin-12, interleukin-17, interleukin-18, interleukin-8, and/or combinations thereof).

[0124] Therapeutic uses of provided marrow stromal cell factors (and/or antibodies and/or receptors thereto) and/or compositions comprising them (and/or antibodies and/or receptors to them) include, for example, uses in medicine. For example, provided compositions may be administered to a subject suffering from or susceptible to one or more diseases, disorders, or conditions associated with inflammation. In some such embodiments, the subject is suffering from or susceptible to one or more diseases, disorders or conditions presented in Table 3:

Table 3
List of Inflammatory Diseases

Multiple sclerosis, type 1 diabetes, rheumatoid arthritis, uveitis, autoimmune thyroid disease,
scleroderma, autoimmune lymphoproliferative disease (ALPS), demyelinating disease,
autoimmune encephalomyelitis, autoimmune gastritis (AIG), autoimmune glomerular disease,
inflammatory bowel disease including Crohn's Disease and ulcerative colitis, psoriasis, uveitis,
Celiac disease, pernicious anemia, Srojen's syndrome, Hashimoto's thyroiditis, Graves' disease,
systemic lupus erythamatosis, acute disseminated encephalomyelitis, Addison's disease,
Ankylosing spondylitis, Antiphospholipid antibody syndrome, Guillain-Barre syndrome,
idiopathic thrombocytopenic purpura, Goodpasture's syndrome, Myasthenia gravis, Pemphigus,
giant cell arteritis, aplastic anemia, autoimmune hepatitis, Kawaski's disease, mixed connective
tissue disease, Ord' throiditis, polyarthritis, primary biliary sclerosis, Reiter's syndrome,
Takaysu's arteritis, vitiligo, warm autoimmune hemolytic anemia, Wegener's granulomatosis,
Chagas' disease, chronic obstructive pulmonary disease, sarcoidosis, acute respiratory distress
syndrome, systemic inflammatory response syndrome, multiple organ dysfunction syndrome,
sepsis, acute pancreatitis, acute liver failure, acute-on-chronic liver failure, chronic liver failure,
acute renal failure, end stage renal disease, chronic renal failure, nephrotic syndrome, nephritic
syndrome, focal segmental glomerulosclerosis, glomerulonephritis, acute tubular necrosis, lupus
nephritis, diabetic nephritis, interstitial nephritis, acute-on-chronic renal failure, aplastic anemia,
fanconi anemia, hemolytic anemia, iron-deficient anemia, pernicious anemia, sickle cell anemia,
hemochromatosis, hemophilia, idiopathic thrombocytopenic purpura, polycythemia vera, rh
incompatibility, thalassemias, thrombocytopenia, thrombocythemia, thrombocytosis,
thrombophlebitis, thrombotic thrombocytopenic purpura, Von Willebrand disease, leukemia,
lymphatic filariasis, Anemia From Excessive Bleeding, Anemia of Chronic Disease,
Autoimmune Hemolytic Anemia, Hemoglobin C, S-C, and E Diseases, Vitamin Deficiency
Anemia, Disseminated Intravascular Coagulation (DIC), Henoch-Schönlein Purpura, Hereditary
Hemorrhagic Telangiectasia, Thrombophilia, Acute Lymphocytic Leukemia (ALL), Acute
Myelocytic Leukemia (AML), Chronic Lymphocytic Leukemia (CLL), Chronic Myelocytic
Leukemia (CML), Hodgkin's Disease, Non-Hodgkin's Lymphomas, Myelofibrosis,
Macroglobulinemia, Monoclonal Gammopathies of Undetermined Significance (MGUS),
Multiple Myeloma, Lymphocytopenia, Neutropenia, Neutrophilic Leukocytosis, Chronic Pain,
Migraine, Multiple Abortions, Asthma, Myocardial Infarction, Atherosclerosis, Cancer, Type 2
Diabetes, Obesity, Psoriatic Arthritis, Polyarticular Juvenile Idiopathic Arthritis, Acute
inflammatory demyelinating polyradiculopathy (Guillain Barre Syndrome), Chronic
inflammatory demyelinating polyradiculopathy, Nerve injury, Graft vs. host disease, Behcet's
disease, Rheumatoid vasculitis, Churg Strauss Syndrome, Takayasu's arteritis, Giant cell
arteritis, Polyarteritis nodosa, Cryoglobulinemic vasculitis, Congestive heart failure, Acute Lung
Injury, and/or combinations thereof.

[0125] In some such embodiments, the subject is suffering from or susceptible to one or more diseases, disorders, or conditions selected from the group consisting of rheumatoid arthritis, type I and type II diabetes, ulcerative colitis, Crohn's disease, celiac disease, multiple sclerosis, myocardial infarction, neoplasm, chronic infectious disease, systemic lupus erythematosus, acute kidney injury, sepsis, multiple organ dysfunction syndrome, acute liver failure, chronic liver failure, chronic kidney failure, pancreatitis, Grave's disease, and combinations thereof.

[0126] In some embodiments, provided marrow stromal cell factors (and/or antibodies and/or receptors thereto) and/or compositions comprising them (and/or antibodies and/or receptors to them) are used to increase production of one or more anti-inflammatory agents in a mammal. In some embodiments, provided factors (and/or antibodies and/or receptors thereto) and/or compositions comprising them (and/or antibodies and/or receptors to them) are used to decrease production of one or more inflammatory agents in a mammal.

[0127] In some embodiments, provided marrow stromal cell factors (and/or antibodies and/or receptors thereto) and/or compositions comprising them (and/or antibodies and/or receptors to them) are administered to a patient who has previously been and/or is currently being treated with at least one pro-inflammatory mediator (for example, but not limited to, lipopolysaccharide (LPS), DNA, RNA, bacterial products, viral products, non-human products, human products, toxins, chemicals, interleukin-1-α, interleukin-1-β, interleukin-6, tumor necrosis factor-α, leukemia inhibitory factor, interferon-γ, other interferons, oncostatin M, ciliary neurotrophic factor, granulocyte-macrophage colony-stimulating factor, interleukin-11, interleukin-12, interleukin-17, interleukin-18, interleukin-8, and/or combinations thereof). In some embodiments, such a patient's leukocytes have been pre-stimulated with the at least one pro-inflammatory mediator prior to treatment with one or more provided marrow stromal cell factors (and/or antibodies and/or receptors thereto) and/or compositions comprising them (and/or antibodies and/or receptors to them). In some embodiments, such a patient's leukocytes have been not pre-stimulated with the at least one pro-inflammatory mediator prior to treatment with one or more provided marrow stromal cell factors (and/or antibodies and/or receptors thereto) and/or compositions comprising them (and/or antibodies and/or receptors to them). In some embodiments, provided marrow stromal cell factors (and/or antibodies and/or receptors thereto) and/or compositions comprising them (and/or antibodies and/or receptors to them) are administered to a patient who has not previously been and/or is not currently being treated with at least one pro-inflammatory mediator (for example, but not limited to, lipopolysaccharide (LPS), DNA, RNA, bacterial products, viral products, non-human products, human products, toxins, chemicals, interleukin-1-α, interleukin-1-β, interleukin-6, tumor necrosis factor-α, leukemia inhibitory factor, interferon-γ, other interferons, oncostatin M, ciliary neurotrophic factor, granulocyte-macrophage colony-stimulating factor, interleukin-11, interleukin-12, interleukin-17, interleukin-18, interleukin-8, and/or combinations thereof). In some embodiments, such a patient's leukocytes have been not pre-stimulated with the at least one pro-inflammatory mediator prior to treatment with one or more provided marrow stromal cell factors (and/or antibodies and/or receptors thereto) and/or compositions comprising them (and/or antibodies and/or receptors to them).

[0128] In some embodiments, provided marrow stromal cell factors (and/or antibodies and/or receptors thereto) and/or compositions comprising them (and/or antibodies and/or receptors to them) are administered to a patient who has previously been and/or is currently being treated with at least one anti-inflammatory mediator (for example, but not limited to, steroids, non-steroidal anti-inflammatory drugs, interleukin-10, TGF-β, interleukin-1 receptor antagonist, interleukin-1 soluble receptor, tumor necrosis factor-α soluble receptors I and II, interleukin-4, interleukin-6, interleukin-11, interleukin-13, interleukin-16, interleukin-18 soluble receptor, atrial natriuretic peptide, interleukin-6 soluble receptor, and/or combinations thereof). In some embodiments, such a patient's leukocytes have been pre-stimulated with the at least one anti-inflammatory mediator prior to treatment with one or more provided marrow stromal cell factors (and/or antibodies and/or receptors thereto) and/or compositions comprising them (and/or antibodies and/or receptors to them). In some embodiments, such a patient's leukocytes have been not pre-stimulated with the at least one anti-inflammatory mediator prior to treatment with one or more provided marrow stromal cell factors (and/or antibodies and/or receptors thereto) and/or compositions comprising them (and/or antibodies and/or receptors to them). In some embodiments, provided marrow stromal cell factors (and/or antibodies and/or receptors thereto) and/or compositions comprising them (and/or antibodies and/or receptors to them) are administered to a patient who has previously been and/or is currently being treated with at least one anti-inflammatory mediator (for example, but not limited to, steroids, non-steroidal anti-inflammatory drugs, interleukin-10, TGF-β, interleukin-1 receptor antagonist, interleukin-1 soluble receptor, tumor necrosis factor-α soluble receptors I and II, interleukin-4, interleukin-6, interleukin-11, interleukin-13, interleukin-16, interleukin-18 soluble receptor, atrial natriuretic peptide, interleukin-6 soluble receptor, and/or combinations thereof). In some embodiments, such a patient's leukocytes have not been pre-stimulated with the at least one anti-inflammatory mediator prior to treatment with one or more provided marrow stromal cell factors (and/or antibodies and/or receptors thereto) and/or compositions comprising them (and/or antibodies and/or receptors to them). In some embodiments, such a patient's leukocytes have been not pre-stimulated with the at least one anti-inflammatory mediator prior to treatment with one or more provided marrow stromal cell factors (and/or antibodies and/or receptors thereto) and/or compositions comprising them (and/or antibodies and/or receptors to them).

### Combination Therapy

[0129] As will be clear to those of ordinary skill in the art, pharmaceutical compositions as described herein may be employed in combination therapy. In some embodiments, two or more agents utilized in combination are administered in a single composition; in some embodiments, two or more agents utilized in combination are administered in separate compositions.

[0130] In some embodiments, as described herein, individual marrow stromal cell factors (e.g., polypeptides as described herein) polypeptides (and/or other provided agents or compositions) are administered in combination with one another (e.g., any combination of one or more of GALNT1 polypeptides, LGALS3BP polypeptides, MFAP5 polypeptides, HAPLN1 polypeptides, PENK polypeptides, nucleic acids encoding any of the foregoing, and/or antibodies against any of the foregoing). In some embodiments, provided polypeptides encoded by genes in Table 2 (and/or other provided agents or compositions) are administered in combination with one another and/or other factors to be used in the treatment of one or more diseases, disorders or conditions. In some embodiments, the one or more diseases, disorders or conditions are characterized by inflammation.

[0131] In some embodiments, individual marrow stromal cell factors (e.g., polypeptides as described herein) polypeptides (and/or other provided agents or compositions) are administered in combination with one or more pro-inflammatory mediators (for example, but not limited to, lipopolysaccharide (LPS), DNA, RNA, bacterial products, viral products, non-human products, human products, toxins, chemicals, interleukin-1-α, interleukin-1-β, interleukin-6, tumor necrosis factor-α, leukemia inhibitory factor, interferon-γ, other interferons, oncostatin M, ciliary neurotrophic factor, granulocyte-macrophage colony-stimulating factor, interleukin-11, interleukin-12, interleukin-17, interleukin-18, interleukin-8, and/or combinations thereof). In some embodiments, individual marrow stromal cell factors (e.g., polypeptides as described herein) polypeptides (and/or other provided agents or compositions) are administered in combination with one or more anti-inflammatory mediators (for example, but not limited to, steroids, non-steroidal anti-inflammatory drugs, interleukin-10, TGF-β, interleukin-1 receptor antagonist, interleukin-1 soluble receptor, tumor necrosis factor-α soluble receptors I and II, interleukin-4, interleukin-6, interleukin-11, interleukin-13, interleukin-16, interleukin-18 soluble receptor, atrial natriuretic peptide, interleukin-6 soluble receptor, and/or combinations thereof).

### Exemplification

[0132] The present inventors have developed new methods for screening proteins expressed by BMSCs. The design of this approach (which can be referred to as “enriched protein screening,” or “EPS”) is shown and described in FIG. 1a.

[0133] The following examples describe use of these methods to identify certain factors produced by MSCs and/or demonstrate that certain factors produced by MSCs modulate inflammatory cytokine production from leukocytes in culture, for example at concentrations within two orders of magnitude of 10 μg/mL and/or within an order of magnitude (or otherwise comparable to) those concentrations at which relevant compounds are naturally found in human serum. These examples also demonstrate that these factors can be exogenously delivered in a purified form to protect mice from inflammatory diseases, disorders, or conditions (e.g., TNBS colitis). In one particular example, isolated and purified molecular products of the genes LGALS3BP, MFAP5, GALNT1, CFH, TFPI2, PENK, HAPLN1 and CRLF1 were administered at concentrations within five orders of magnitude, either higher or lower, of 10 μg/mL, and shown to either promote IL-10 production or suppress IFN-γ production in human leukocytes in culture. Four of these purified molecular products, namely from genes LGALS3BP, MFAP5, PENK, and GALNT1, were administered to colitic mice and three of the four, LGALS3BP, PENK, and MFAP5, were shown to protect the mice from developing acute colitis.

### Materials and Methods

### Statistics

[0134] Unless otherwise noted, all experiments were repeated in quadruplicate, and all data were assessed for significance using a paired, two-tail Student's T test.

### Cell Culture and Conditioned Medium

[0135] BMSCs were isolated, purified, grown and characterized, and fibroblasts grown as described previously (Jiao, Y., Milwid, J. M., Yarmush, M. L. & Parekkadan, B. in Suppression and Regulation of Immune Responses, Vol. 677. (eds. M. Cuturi & I. Anegon) (Humana Press and Springer, Totowa, N.J., USA; 2010); and Parekkadan, B. et al. Mesenchymal stem cell-derived molecules reverse fulminant hepatic failure. PLoS ONE 2 (2007); the contents of both of which are incorporated herein by reference). All BMSCs were used at passage 2-5. Conditioned medium was also collected and concentrated as described previously (van Poll, D. et al. Mesenchymal stem cell-derived molecules directly modulate hepatocellular death and regeneration in vitro and in vivo. Hepatology 47, 1634-1643 (2008); incorporated herein by reference). For BMSC_{LPS} conditioned medium and cells used for gene expression analysis, BMSCs were grown to >80% confluence and rinsed twice with PBS. BMSC or fibroblast expansion medium supplemented with 1 μg/mL LPS (E. coli 0111:B4; Sigma, St. Louis, Mo.) was then added to cells for 24 hours, at which time cells were rinsed with PBS twice again and incubated for an additional 24 hours with serum-free DMEM to produce conditioned medium. By convention, 1× refers to the concentration of conditioned medium achieved when 15 mL of conditioning medium was incubated in the presence of 2×10⁶ cells for 24 hours, collected, and concentrated to a final volume of 1 mL.

### Peripheral Blood Mononuclear Cell Potency Assay

[0136] The assay was performed as before (Jiao, Y., Milwid, J. M., Yarmush, M. L. & Parekkadan, B. in Suppression and Regulation of Immune Responses, Vol. 677. (eds. M. Cuturi & I. Anegon) (Humana Press and Springer, Totowa, N.J., USA; 2010); incorporated herein by reference). Approval for the collection of blood from healthy volunteers was obtained from the Institutional Review Board of Massachusetts General Hospital. For the majority of the experiments, the potency assay was terminated at 5 hours for IL-10 analysis.

### Gene Expression Analysis

[0137] Gene expression was evaluated using Affymetrix GeneChip® Human Genome U133 Plus 2.0 Arrays (Affymetrix, Santa Clara, Calif.). Array quality was assessed using the R/Bioconductor package (Gentleman, R. et al. Bioconductor: open software development for computational biology and bioinformatics. Genome Biology 5, R80 (2004); incorporated herein by reference). All arrays passed visual inspection and no technical outliers were identified (n=3 arrays per cell type). Raw CEL files were processed using the robust multiarray average (RMA) algorithm (Irizarry, R. et al. Summaries of Affymetrix GeneChip probe level data. Nucleic Acids Research 31, e15 (2003); incorporated herein by reference). To identify genes correlating with the observed phenotypic groups, we used limma (Smyth, G. Linear models and empirical Bayes methods for assessing differential expression in microarray experiments. Statistical Applications in Genetics and Molecular Biology 3, 1027 (2004); incorporated herein by reference) to fit a statistical linear model to the data and then tested for differential gene expression in the contrasts of interest: FB vs. BMSC; BMSC vs. LPS. Results were adjusted for multiple testing using the Benjamini and Hochberg (BH) method (Benjamini, Y. & Hochberg, Y. Controlling the false discovery rate: a practical and powerful approach to multiple testing. Journal of the Royal Statistical Society. Series B (Methodological) 57, 289-300 (1995); incorporated herein by reference), and significance was determined using a False-Discovery-Rate cutoff of less than 1%. All genes identified to be upregulated in BMSCs compared to FBs and either expressed equally or upregulated in BMSC_{LPS} compared to BMSCs were then analyzed by literature review for definitive evidence of production of a secreted protein by human cells to generate the list of genes reported here. Independent analysis conducted in collaboration with a second computational biology facility confirmed these same results with >95% overlap of secreted proteins identified via literature review.

### Recombinant Protein Screen

[0138] Recombinant proteins were acquired from a commercial vendor (Abnova, Taipei, Taiwan). The proteins were diluted in PBS and added to the PBMC potency assay to achieve a range of final concentrations spanning ˜1 μg/mL to ˜0.01 ng/mL.

### ELISAs and Western Blots

[0139] The ELISA kits used were provided by commercial vendors and were used according to the manufacturers' instructions (IL-10 in cell supernatants: BD, Franklin Lakes, N.J.; LGALS3BP: Abnova, Taipei, Taiwan; IL-10 and TNF-α from animal serum: R&D Systems, Minneapolis, Minn.). To blot for GALNT1, MFAP5 and PENK, FB-CM, BMSC-CM and BMSC_{LPS}-CM were run out using protein gel electrophoresis (Pierce, Rockford, Ill.) followed by blotting using detection antibodies (Sigma, St. Louis, Mo.) applied at a dilution of 1:500 (GALNT1 and MFAP5) or 1:100 (PENK), and corresponding secondary antibodies (anti-rabbit for GALNT1 and MFAP5 and anti-goat for PENK) conjugated with HRP (Sigma, St. Louis, Mo.). For the LGALS3BP ELISA and the MFAP5 blot, 1× conditioned media were used, and for the GALNT1 and PENK blots, 20× conditioned media were used.

### Mass Spectrometry

[0140] Mass spectrometry was performed at the Mass Spectrometry Core facility of the Beth Israel Deaconess Medical Center at Harvard Medical School as previously described (Jiang, X., Chen, S., Asara, J. & Balk, S. Phosphoinositide 3-kinase pathway activation in phosphate and tensin homolog (PTEN)-deficient prostate cancer cells is independent of receptor tyrosine kinases and mediated by the p110 and p110 catalytic subunits. Journal of Biological Chemistry 285, 14980 (2010); incorporated herein by reference). 10× samples of BMSC-CM, FB-CM and BMSC_{LPS}-CM were initially separated by SDS-PAGE and bands were excised and trypsin digested for analysis via tandem LC/MS/MS. The false discovery rate (FDR) for peptide identifications was ˜1.5% and less than 0.5% for protein identifications.

### In Vivo Mouse Assay

[0141] All procedures were performed in accordance with the animal rights policies of the Massachusetts General Hospital Subcommittee on Research Animal Care. For the sub-lethal LPS model, eight week old female BALB/cJ mice (n≧3) (Jackson Laboratories, Bar Harbor, Me.) were administered an initial dose of either vehicle or one of the experimental therapies IP: 200 μL of saline (vehicle), or 3 μg of protein (e.g., GALNT1, LGALS3BP, MFAP5 or PENK) diluted in 200 μL of saline, or 1 mL of 1×BMSC-CM. 16 hours later, mice received a second dose of either vehicle or therapy in conjunction with a dose of 100 μg of LPS (E. coli 0111:B4; Sigma, St. Louis, Mo.) diluted in physiological saline. 48 hours later, mice were sacrificed and tissue and blood were collected for analysis. Serum was tested for the presence of IL-10 and TNF-α via ELISA and lungs, livers and kidneys of the animals were preserved for hematoxylin and eosin staining. For the lethal LPS model, eight week old female BALB/cJ mice (n≧5) were co-administered a lethal dose of LPS (350 μg LPS in 100 μL physiological saline) and either vehicle (negative control), 5 μg anti-TNF-α (positive control; R&D Systems, Minneapolis, Minn.), 4 μg MFAP5 diluted in 100 μL of physiological saline, or 4 μg of PENK diluted in 100 μL of physiological saline. Mice were monitored for survival for seven days (168 hours).

### Chromatography of BMSC-CM

[0142] BMSC-CM was injected into the flow circuit of an AKTA purifier FPLC (GE Healthcare, Buckinghamshire, UK) and set to run at 0.5 mL/min. The injected BMSC-CM was run over either a Superdex 200 size exclusion column (GE Healthcare, Buckinghamshire, UK) or a Mono Q 10/100 GL ion exchange column and fixed-volume fractionation was performed using an AKTA Frac-950 (0.5 mL; GE Healthcare, Buckinghamshire, UK).

### Preconditioning of BMSCs

[0143] BMSCs were cultured and expanded until >80% confluent. Culture medium was aspirated and the cells rinsed twice with PBS. Culture medium was added to the cells supplemented with varying concentrations of the following: IFN-γ, TNF-α, IL-6 and IL-1β (R&D Systems, Minneapolis, Minn.); Poly I:C DNA (Invivogen, San Diego, Calif.); and LPS (E. coli 0111:B4; Sigma, St. Louis, Mo.). Cells were incubated in the presence of these additives for 24 hours, followed by aspiration of supernatant, two washes with PBS, and addition of DMEM conditioning medium. DMEM conditioning medium was incubated in the presence of cells for 24 hours when it was collected and concentrated as for BMSC-CM.

### Example 1

### Stimulation of Anti-inflammatory Cytokine Production by MSC Secreted Factors

[0144] Preparations were made of marrow stromal cell secreted factors by culturing MSCs in the presence of serum-free DMEM for 24 hours, followed by collection and concentration of the supernatant using a 3-kDa cutoff ultrafiltration membrane to yield what is referred to herein as MSC conditioned medium (MSC-CM). In certain experiments, conditioned medium was prepared from skin fibroblasts or from MSCs that have been stimulated with 1 μg/mL of lipopolysaccharide (LPS) supplemented into MSC growth medium for 24 hours prior to conditioning in serum-free DMEM. The concentration of the conditioned medium was defined by the following nomenclature: 1×MSC-CM corresponds herein to the equivalent of 2×10⁶ MSCs cultured in the presence of serum-free DMEM that was concentrated down to a volume of 1 mL after 24 hours of conditioning. Therefore, 10×MSC-CM herein corresponds to the equivalent of 20×10⁶ cells conditioned and concentrated into a final volume of 1 mL.

[0145] Leukocytes were prepared from fresh whole human blood, collected and spun in the presence of Ficoll for 30 minutes at 1500×g. The mononuclear cell layer was transferred to a new tube where it was washed once with RPMI 1640. The mononuclear cells were plated at a density of 1×10⁵ per well of a 96-well plate in 50 μL of RPMI 1640 per well. MSC-CM was then immediately added to each well and allowed to incubate in the presence of the mononuclear cells for 16 hours. After incubation, 50 μL of RPMI 1640 containing 10 μg/mL of LPS was added to each well and allowed to incubate for an additional 5 hours. The resultant supernatants were collected and analyzed via ELISA for human interleukin-10 (IL-10). This procedure of incubating leukocytes with MSC-CM to determine IL-10 stimulating activity will be henceforth referred to as the “IL-10 assay”.

[0146] MSC-CM was found to cause a significant increase in the IL-10 production of the cultured leukocytes once stimulated with LPS, as seen in FIG. 1b-1c. As also seen in this Figure, the IL-10 production of the leukocytes incubated with MSC-CM responded in a dose-dependent manner, indicating a positive effect of concentrating the conditioned medium on the potency of the IL-10 response.

[0147] A reproducible in vitro potency assay was used to evaluate bulk anti-inflammatory activity of BMSC-CM (FIG. 1b). These assays demonstrated that LPS-stimulated production of IL-10 by human peripheral blood mononuclear cells (PBMCs) increased significantly when the PBMCs were incubated with BMSC-CM compared to vehicle control (FIG. 1c). Upregulation of IL-10 in PBMCs was time- and dose-dependent (FIG. 2a-b) and was induced by protease-sensitive constituents of BMSC-CM (FIG. 2c).

### Example 2

### Differential Gene Expression Analysis to Determine Active Factors from MSCs

[0148] To identify and purify individual factors responsible for this IL-10 response, the inventors performed LC/MS analysis. The inventors successfully identified regions of activity with LC separation based on size and charge (FIG. 3a-b).

[0149] To circumvent individually screening hundreds of proteins secreted by BMSCs (van Poll, D. et al. Mesenchymal stem cell-derived molecules directly modulate hepatocellular death and regeneration in vitro and in vivo. Hepatology 47, 1634-1643 (2008); and Chen, L., Tredget, E., Wu, P. & Wu, Y. Paracrine factors of mesenchymal stem cells recruit macrophages and endothelial lineage cells and enhance wound healing. Plos One 3 (2008); both of which are incorporated herein by reference), the inventors developed a comparative gene expression scheme that enabled rational enrichment for candidate proteins that contribute to the anti-inflammatory activity of BMSC-CM. To this end, the inventors first sought to identify a “BMSC signature” in terms of BMSC genes that were associated with IL-10 upregulation in our potency assay. This led to identification of one or more comparative BMSC analogs that were likely to express many similar genes as BMSCs, but lacked activity in the potency assay. CMs from a similar stromal cell (normal human skin fibroblasts (FB)) were tested, and it was determined that FB-CM did not cause a significant increase in IL-10 expression in the potency assay (FIG. 1d). Comparison of gene expression of BMSCs and FBs, yielded a list of ˜500 genes uniquely upregulated in BMSCs. One additional, but essential comparative group, was then included to refine the “BMSC signature”.

[0150] The expression signature of BMSCs was then perturbed by establishing conditions under which the activity of the BMSC-CM was enhanced. BMSCs display a number of surface cytokine and toll-like receptors that have been implicated in their immunomodulatory phenotype (Tomchuck, S. L. et al. Toll-like receptors on human mesenchymal stem cells drive their migration and immunomodulating responses. Stem Cells 26, 99-107 (2008); incorporated herein by reference). BMSCs were pre-stimulated with a selection of the cognate ligands for these receptors for 24 hours prior to conditioning. These experiments demonstrated that BMSC-CM from cells that were pre-stimulated with LPS exhibited significantly higher activity in the potency assay (FIG. 1d and FIG. 2d). This information was used to further refine the inventors' analysis by cross-referencing the list of BMSC-specific genes with genes that were maintained at the same level or significantly upregulated by BMSCs stimulated with LPS (BMSC_{LPS}) compared to BMSCs. This comparison revealed 139 genes (FIG. 1e). A literature search was then conducted to determine which of these genes correspond to a secreted protein, yielding a highly enriched set of 22 genes (FIG. 1f).

[0151] Recombinant molecules were obtained as products of the genes listed in Table 2, which represent the secreted molecule fraction of genes upregulated in LPS-pre-stimulated MSCs compared to MSCs and fibroblasts. The inventors then assembled a purified recombinant protein library corresponding to the 22 candidate genes identified by the enrichment technique. The proteins were individually screened in the in vitro potency assay using a range of physiologically-relevant concentrations. It was found that 4 of the 22 screened proteins successfully upregulated IL-10 secretion when present at ˜100 nM concentrations (FIG. 4a).

[0152] Recombinant molecules were obtained as products of the genes listed in Table 2, which represent the secreted molecule fraction of genes upregulated in LPS-pre-stimulated MSCs compared to MSCs and fibroblasts. The molecules were diluted in RPMI 1640 and activity was evaluated using the IL-10 assay (FIG. 5 and FIG. 4a). The four most potent molecules were the protein products of the genes LGALS3BP, MFAP5, GALNT1 and PENK, and all induced an increase of IL-10 production superior to that induced by 10×MSC-CM. FIG. 5 shows the increased production of IL-10 in leukocytes incubated with three of these molecules and reveals a dose-dependency over several orders of magnitude of dilution in RPMI 1640.

[0153] To confirm that BMSC-CM contained the four proteins, polypeptide N-acetylgalactosaminyltransferase 1 (GALNT1), galectin-3-binding protein (LGALS3BP), MFAP5 and PENK, we performed Western blots for GALNT1, MFAP5 and PENK, and used an ELISA for LGALS3BP (FIG. 4b). Clear bands were observed for MFAP5 and ELISA results showed LGALS3BP to be present at ng/mL concentrations in the BMSC-CM. GALNT1 and PENK were not present at detectable levels, even when the CM was concentrated 100-fold. We also performed proteomic LC/MS on bulk BMSC-CM and identified several of the 22 proteins in our enriched library, including LGALS3BP (FIG. 4c). Nevertheless, LC/MS failed to discern 18 of the 22 proteins (81%) from the enriched library, including GALNT1, MFAP5 and PENK. Taken together, these results demonstrate an unprecedented hit rate of protein discovery via EPS (18%), which is several orders of magnitude higher than traditional high throughput approaches that achieve in vitro rates on the order of 0.03-0.2% (Mayer, T. et al. Small molecule inhibitor of mitotic spindle bipolarity identified in a phenotype-based screen. Science 286, 971 (1999); Kwok, T. et al. A small-molecule screen in C. elegans yields a new calcium channel antagonist. Nature 441, 91-95 (2006); and Hung, D., Shakhnovich, E., Pierson, E. & Mekalanos, J. Small-molecule inhibitor of Vibrio cholerae virulence and intestinal colonization. Science 310, 670 (2005); all of which are incorporated herein by reference).

### Example 3

### Treatment of Colitic Mice with Factors Identified in the Differential Gene Expression Analysis

[0154] To test whether this observed effect was reproducible in vivo, animals were subjected to TNBS colitis followed by treatment with the four most potent molecules, LGALS3BP, MFAP5, GALNT1 and PENK. As seen in FIG. 6, MFAP5, LGALS3BP and PENK provided significant attenuation of colitis compared to controls. MFAP5, LGALS3BP and PENK all protected the colonic epithelium from the hallmark features of TNBS colitis: necrosis, inflammatory infiltrate and loss of crypts. Especially at the microscopic level, the tissue of the MFAP5, LGALS3BP and PENK treated animals looked mostly normal with minor foci of inflammation and edema.

### Example 4

### Suppression of Pro-Inflammatory Cytokines by MSC Factors and Active, Individual Agents Identified by Differential Gene Expression Analysis

[0155] Preparations and use of MSC-CM, Fb-CM, LPS-stimulated MSC-CM, leukocytes were as described in Examples 1-3 and the Figures. These conditioned media preparations were added to leukocyte cultures for 16 hours, after which the culture was stimulated with LPS at 10 μg/ml. The medium from this culture was collected 24 hours after LPS stimulation of leukocytes and analyzed using an IFN-γ ELISA.

[0156] MSC-CM was found to cause a significant decrease in IFN-γ production of the cultured leukocytes once stimulated with LPS, as seen in FIG. 7. As also seen in this Figure, the IFN-γ production of the leukocytes incubated with Fb-CM was similar in amount to using the same volume of RPMI medium as a control. In contrast, LPS-stimulated MSC-CM reduced IFN-γ production even lower than MSCs that had not received prior stimulation with LPS. These results indicated that MSCs secrete specific factors that decrease IFN-γ production from leukocytes in a manner that fit the prerequisites for our differential gene expression analysis. From the analysis performed in Example 2, HAPLN1 was identified and observed to independently reduce IFN-γ production from leukocytes when used in a purified, recombinant form. These results indicated a dose-dependency of IFN-γ production over several orders of magnitude of diluted HAPLN1 in RPMI 1640. FIG. 7 also states the identifying sequence of HAPLN1 found in MSC-CM by size separation liquid chromatography followed by mass spectrometry.

### Example 5

### Treatment of LPS-Treated Mice with Factors Identified in the Differential Gene Expression Analysis

[0157] The four hits from the enriched recombinant protein screen were tested for activity in vivo in animals challenged with a sub-lethal dose of LPS (FIG. 8a). Significantly elevated serum IL-10 levels were observed in LPS-treated mice receiving BMSC-CM, GALNT1, MFAP5 and PENK compared to baseline vehicle control (saline), but no IL-10 response from LGALS3BP (FIG. 8b). Serum TNF-α was also significantly suppressed in mice receiving BMSC-CM, LGALS3BP, MFAP5 and PENK, but not GALNT1 (FIG. 8c). In addition, MFAP5 and PENK demonstrated superior TNF-α suppression compared to BMSC-CM. These results suggest that the different factors may influence different pathways, and the present invention encompasses the recognition that combinations of these factors can be used to treat multiple pathways in parallel.

[0158] The effects of cytokine modulation were apparent in the lung histology of the animals (FIG. 8d). In vehicle treated animals, edema, inflammatory infiltrate and alveolar collapse were evident in all lung fields. MFAP5 showed superior lung protection, preventing widespread inflammatory cell infiltrate and edema, thereby preserving the structure of the alveoli in the majority of the lungs. PENK, BMSC-CM and GALNT1 showed moderate protection with apparent inflammatory infiltrate, emphysematous changes and alveolar wall thickening, but no frank alveolar collapse.

[0159] The two most promising proteins, MFAP5 and PENK, were then tested in mice challenged with a lethal dose of LPS. Compared to anti-TNF-α, both proteins exhibited similar protection and provided a significant survival benefit.

### REFERENCES

[0160] Aggarwal, S, and M. Pittenger (2005). “Human mesenchymal stem cells modulate allogeneic immune cell responses.” Blood 105(4): 1815-1822.
[0161] Aggarwal, S, and M. F. Pittenger (2005). “Human mesenchymal stem cells modulate allogeneic immune cell responses.” Blood 105(4): 1815-22.
[0162] Albig, A., D. Becenti, et al. (2008). “Microfibril-associate glycoprotein-2 (MAGP-2) promotes angiogenic cell sprouting by blocking notch signaling in endothelial cells.” Microvascular research.
[0163] Amado, L., A. Saliaris, et al. (2005). “Cardiac repair with intramyocardial injection of allogeneic mesenchymal stem cells after myocardial infarction.” Proceedings of the National Academy of Sciences 102(32): 11474-11479.
[0164] Arnulf, B., S. Lecourt, et al. (2007). “Phenotypic and functional characterization of bone marrow mesenchymal stem cells derived from patients with multiple myeloma.” Leukemia 21(1): 158-63.
[0165] Augello, A., R. Tasso, et al. (2005). “Bone marrow mesenchymal progenitor cells inhibit lymphocyte proliferation by activation of the programmed death 1 pathway.” European Journal of Immunology 35(5).
[0166] Auvinen, P., R. Tammi, et al. (2000). “Hyaluronan in peritumoral stroma and malignant cells associates with breast cancer spreading and predicts survival.” American Journal of Pathology 156(2): 529.
[0167] Barta, E., F. Deak, et al. (1993). “Evolution of the hyaluronan-binding module of link protein.”Biochemical Journal 292(Pt 3): 947.
[0168] Bartholomew, A., C. Sturgeon, et al. (2002). “Mesenchymal stem cells suppress lymphocyte proliferation in vitro and prolong skin graft survival in vivo.” Experimental Hematology 30(1): 42-48.
[0169] Behar, O., H. Ovadia, et al. (1994). “Lipopolysaccharide induces proenkephalin gene expression in rat lymph nodes and adrenal glands.” Endocrinology 134(1): 475-81.
[0170] Beyth, S., Z. Borovsky, et al. (2005). “Human mesenchymal stem cells alter antigen-presenting cell maturation and induce T-cell unresponsiveness.” Blood 105(5): 2214-9.
[0171] Block, G., S. Ohkouchi, et al. (2009). “Multipotent stromal cells are activated to reduce apoptosis in part by upregulation and secretion of stanniocalcin-1.” Stem Cells 27(3).
[0172] Blundell, C., D. Mahoney, et al. (2003). “The link module from ovulation- and inflammation-associated protein TSG-6 changes conformation on hyaluronan binding.” Journal of Biological Chemistry 278(49): 49261.
[0173] Brazowski, E., I. Dotan, et al. (2009). “Galectin-3 expression in pouchitis in patients with ulcerative colitis who underwent ileal pouch-anal anastomosis (IPAA).” Pathol Res Pract 205(8): 551-8.
[0174] Breton, C., R. Oriol, et al. (1996). “Sequence alignment and fold recognition of fucosyltransferases.” Glycobiology 6(7).
[0175] Corcione, A., F. Benvenuto, et al. (2006). “Human mesenchymal stem cells modulate B-cell functions.” Blood 107(1): 367-372.
[0176] D'Ostilio, N., G. Sabatino, et al. (1996). “90K (Mac-2 BP) in human milk.” Clin Exp Immunol 104(3): 543-6.
[0177] Di Nicola, M., C. Carlo-Stella, et al. (2002). “Human bone marrow stromal cells suppress T-lymphocyte proliferation induced by cellular or nonspecific mitogenic stimuli.” Blood 99(10): 3838.
[0178] Djouad, F., P. Plence, et al. (2003). “Immunosuppressive effect of mesenchymal stem cells favors tumor growth in allogeneic animals.” Blood 102(10): 3837-44.
[0179] Djouad, F., P. Plence, et al. (2003). “Immunosuppressive effect of mesenchymal stem cells favors tumor growth in allogeneic animals.” Blood 102(10): 3837-3844.
[0180] Fiorina, P., M. Jurewicz, et al. (2009). “Immunomodulatory Function of Bone Marrow-Derived Mesenchymal Stem Cells in Experimental Autoimmune Type 1 Diabetes.” The Journal of Immunology 183(2): 993.
[0181] Gerdoni, E., B. Gallo, et al. (2007). “Mesenchymal stem cells effectively modulate pathogenic immune response in experimental autoimmune encephalomyelitis.” Annals of Neurology 61(3): 219.
[0182] Gibson, M., G. Hatzinikolas, et al. (1996). “Further characterization of proteins associated with elastic fiber microfibrils including the molecular cloning of MAGP-2 (MP25).” Journal of Biological Chemistry 271(2): 1096.
[0183] Gibson, M., D. Leavesley, et al. (1999). “Microfibril-associated Glycoprotein-2 Specifically Interacts with a Range of Bovine and Human Cell Types via alpha Vbeta 3 Integrin.” Journal of Biological Chemistry 274(19): 13060.
[0184] Goumon, Y., K. Lugardon, et al. (1998). “Characterization of antibacterial COOH-terminal proenkephalin-A-derived peptides (PEAP) in infectious fluids. Importance of enkelytin, the antibacterial PEAP209-237 secreted by stimulated chromaffin cells.” J Biol Chem 273(45): 29847-56.
[0185] Hook, V. Y., S, Noctor, et al. (1999). “Evidence for functional localization of the proenkephalin-processing enzyme, prohormone thiol protease, to secretory vesicles of chromaffin cells.” Endocrinology 140(8): 3744-54.
[0186] Horwitz, E., D. Prockop, et al. (1999). “Transplantability and therapeutic effects of bone marrow-derived mesenchymal cells in children with osteogenesis imperfecta.” Nature Medicine 5(3): 309-313.
[0187] Imberty, A., V. Piller, et al. (1997). “Fold recognition and molecular modeling of a lectin-like domain in UDP-GalNAc: polypeptide N-acetylgalactosaminyltransferases.” Protein Engineering Design and Selection 10(12): 1353.
[0188] Ivanova, A., C. Goparaju, et al. (2009). “Protumorigenic Role of HAPLN1 and Its IgV Domain in Malignant Pleural Mesothelioma.” Clinical Cancer Research 15(8): 2602.
[0189] Jiang, X. X., Y. Zhang, et al. (2005). “Human mesenchymal stem cells inhibit differentiation and function of monocyte-derived dendritic cells.” Blood 105(10): 4120-6.
[0190] Klyushnenkova, E., J. Mosca, et al. (1998). “Human mesenchymal stem cells suppress allogeneic T cell responses in vitro: implications for allogeneic transplantation.” Blood 92(suppl 1): 2652.
[0191] Klyushnenkova, E., J. D. Mosca, et al. (2005). “T cell responses to allogeneic human mesenchymal stem cells: immunogenicity, tolerance, and suppression.” J Biomed Sci 12(1): 47-57.
[0192] Koths, K., E. Taylor, et al. (1993). “Cloning and characterization of a human Mac-2-binding protein, a new member of the superfamily defined by the macrophage scavenger receptor cysteine-rich domain.” J Biol Chem 268(19): 14245-9.
[0193] Lazarus, H., S. Haynesworth, et al. (1995). “Ex vivo expansion and subsequent infusion of human bone marrow-derived stromal progenitor cells (mesenchymal progenitor cells): implications for therapeutic use.” Bone Marrow Transplantation 16(4): 557.
[0194] Le Blanc, K. (2003). “Immunomodulatory effects of fetal and adult mesenchymal stem cells.”Cytotherapy 5(6): 485-9.
[0195] Le Blanc, K., I. Rasmusson, et al. (2004). “Treatment of severe acute graft-versus-host disease with third party haploidentical mesenchymal stem cells.” Lancet 363(9419): 1439-41.
[0196] Le Blanc, K., L. Tammik, et al. (2003). “Mesenchymal stem cells inhibit and stimulate mixed lymphocyte cultures and mitogenic responses independently of the major histocompatibility complex.” Scandinavian Journal of Immunology 57(1): 11.
[0197] Lee, R., A. Pulin, et al. (2009). “Intravenous hMSCs Improve Myocardial Infarction in Mice because Cells Embolized in Lung Are Activated to Secrete the Anti-inflammatory Protein TSG-6.” Cell Stem Cell 5(1): 54-63.
[0198] Li, Y. P., S. Paczesny, et al. (2008). “Human Mesenchymal Stem Cells License Adult CD34+ Hemopoietic Progenitor Cells to Differentiate into Regulatory Dendritic Cells through Activation of the Notch Pathway.” J Immunol 180(3): 1598-608.
[0199] Liechty, K., T. MacKenzie, et al. (2000). “Human mesenchymal stem cells engraft and demonstrate site-specific differentiation after in utero transplantation in sheep.” Nature Medicine 6(11): 1282-1286.
[0200] Liu, J., X. F. Lu, et al. (2004). “Suppression of human peripheral blood lymphocyte proliferation by immortalized mesenchymal stem cells derived from bone marrow of Banna Minipig inbred-line.” Transplant Proc 36(10): 3272-5.
[0201] Marchetti, A., N. Tinari, et al. (2002). “Expression of 90K (Mac-2 BP) correlates with distant metastasis and predicts survival in stage I non-small cell lung cancer patients.” Cancer Res 62(9): 2535-9.
[0202] Meisel, R., A. Zibert, et al. (2004). “Human bone marrow stromal cells inhibit allogeneic T-cell responses by indoleamine 2,3-dioxygenase-mediated tryptophan degradation.” Journal of the American Society of Nephrology 103(12): 4619-4621.
[0203] Metz-Boutigue, M. H., A. E. Kieffer, et al. (2003). “Innate immunity: involvement of new neuropeptides.” Trends Microbiol 11(12): 585-92.
[0204] Miyahara, Y., N. Nagaya, et al. (2006). “Monolayered mesenchymal stem cells repair scarred myocardium after myocardial infarction.” Nature Medicine 12(4): 459-465.
[0205] Miyamoto, A., R. Lau, et al. (2006). “Microfibrillar proteins MAGP-1 and MAGP-2 induce Notch1 extracellular domain dissociation and receptor activation.” Journal of Biological Chemistry 281(15): 10089.
[0206] Neame, P., J. Christner, et al. (1986). “The primary structure of link protein from rat chondrosarcoma proteoglycan aggregate.” Journal of Biological Chemistry 261(8): 3519.
[0207] Németh, K., A. Leelahavanichkul, et al. (2008). “Bone marrow stromal cells attenuate sepsis via prostaglandin E2-dependent reprogramming of host macrophages to increase their interleukin-10 production.” Nature Medicine 15: 42-49.
[0208] Ortiz, L., F. Gambelli, et al. (2003). “Mesenchymal stem cell engraftment in lung is enhanced in response to bleomycin exposure and ameliorates its fibrotic effects.” Proceedings of the National Academy of Sciences 100(14): 8407-8411.
[0209] Penner, A., M. Rock, et al. (2002). “Microfibril-associated glycoprotein-2 interacts with fibrillin-1 and fibrillin-2 suggesting a role for MAGP-2 in elastic fiber assembly.” Journal of Biological Chemistry 277(38): 35044-35049.
[0210] Pittenger, M. (2009). “Sleuthing the Source of Regeneration by MSCs.” Cell Stem Cell 5(1): 8-10.
[0211] Poggi, A., C. Prevosto, et al. (2005). “Interaction between Human NK Cells and Bone Marrow Stromal Cells Induces NK Cell Triggering: Role of NKp30 and NKG2D Receptors 1.” The Journal of Immunology 175(10): 6352-6360.
[0212] Potian, J. A., H. Aviv, et al. (2003). “Veto-like activity of mesenchymal stem cells: functional discrimination between cellular responses to alloantigens and recall antigens.” J Immunol 171(7): 3426-34.
[0213] Prevosto, C., M. Zancolli, et al. (2007). “Generation of CD4+ or CD8+ regulatory T cells upon mesenchymal stem cell-lymphocyte interaction.” Haematologica 92(7): 881-8.
[0214] Raffaghello, L., G. Bianchi, et al. (2008). “Human mesenchymal stem cells inhibit neutrophil apoptosis: a model for neutrophil preservation in the bone marrow niche.” Stem Cells 26(1): 151.
[0215] Rasmusson, I., K. Le Blanc, et al. (2007). “Mesenchymal stem cells stimulate antibody secretion in human B cells.” Scand J Immunol 65(4): 336-43.
[0216] Rasmusson, I., M. Uhlin, et al. (2007). “Mesenchymal stem cells fail to trigger effector functions of cytotoxic T lymphocytes.” J Leukoc Biol 82(4): 887-93.
[0217] Resnick, D., A. Pearson, et al. (1994). “The SRCR superfamily: a family reminiscent of the Ig superfamily.” Trends Biochem Sci 19(1): 5-8.
[0218] Rojas, M., J. Xu, et al. (2005). “Bone marrow derived mesenchymal stem cells in repair of the injured lung.” American Journal of Respiratory Cell and Molecular Biology: 2004.
[0219] Rosenberg, I., B. J. Cherayil, et al. (1991). “Mac-2-binding glycoproteins. Putative ligands for a cytosolic beta-galactoside lectin.” J Biol Chem 266(28): 18731-6.
[0220] Salzet, M. and A. Tasiemski (2001). “Involvement of pro-enkephalin-derived peptides in immunity.” Dev Comp Immunol 25(3): 177-85.
[0221] Sasaki, T., C. Brakebusch, et al. (1998). “Mac-2 binding protein is a cell-adhesive protein of the extracellular matrix which self-assembles into ring-like structures and binds beta1 integrins, collagens and fibronectin.” EMBO J 17(6): 1606-13.
[0222] Shake, J., P. Gruber, et al. (2002). “Mesenchymal stem cell implantation in a swine myocardial infarct model: engraftment and functional effects.” The Annals of Thoracic Surgery 73(6): 1919-1926.
[0223] Sharp, B. M., S. Roy, et al. (1998). “Evidence for opioid receptors on cells involved in host defense and the immune system.” J Neuroimmunol 83(1-2): 45-56.
[0224] Sotiropoulou, P., S. Perez, et al. (2006). “Interactions between human mesenchymal stem cells and natural killer cells.” Stem Cells 24(1): 74-85.
[0225] Spaggiari, G., A. Capobianco, et al. (2008). “Mesenchymal stem cells inhibit natural killer-cell proliferation, cytotoxicity, and cytokine production: role of indoleamine 2,3-dioxygenase and prostaglandin E2.” Blood 111(3): 1327.
[0226] Spaggiari, G., A. Capobianco, et al. (2006). “Mesenchymal stem cell-natural killer cell interactions: evidence that activated NK cells are capable of killing MSCs, whereas MSCs can inhibit IL-2-induced NK-cell proliferation.” Blood 107(4): 1484-1490.
[0227] Spicer, A., A. Joo, et al. (2003). “A Hyaluronan Binding Link Protein Gene Family Whose Members Are Physically Linked Adjacent to Chrondroitin Sulfate Proteoglycan Core Protein Genes.” Journal of Biological Chemistry 278(23): 21083.
[0228] Tenno, M., S. Toba, et al. (2002). “Identification of two cysteine residues involved in the binding of UDP-GalNAc to UDP-GalNAc: polypeptide N-acetylgalactosaminyltransferase 1 (GalNAc-T1).” European Journal of Biochemistry 269(17): 4308-4316.
[0229] Togel, F., Z. Hu, et al. (2005). “Administered mesenchymal stem cells protect against ischemic acute renal failure through differentiation-independent mechanisms.” American Journal of Physiology Renal Physiology 289(1): F31.
[0230] Togel, F., K. Weiss, et al. (2007). “Vasculotropic, paracrine actions of infused mesenchymal stem cells are important to the recovery from acute kidney injury.” American Journal of Physiology Renal Physiology 292(5): F1626.
[0231] Torlakovic, E. E., V. Keeler, et al. (2009). “Cyclophilin C-associated protein (CyCAP) knock-out mice spontaneously develop colonic mucosal hyperplasia and exaggerated tumorigenesis after treatment with carcinogen azoxymethane.” BMC Cancer 9: 251.
[0232] Traggiai, E., S. Volpi, et al. (2008). “Bone marrow-derived mesenchymal stem cells induce both polyclonal expansion and differentiation of B cells isolated from healthy donors and systemic lupus erythematosus patients.” Stem Cells 26(2): 562-9.
[0233] Trahey, M. and I. L. Weissman (1999). “Cyclophilin C-associated protein: a normal secreted glycoprotein that down-modulates endotoxin and proinflammatory responses in vivo.” Proc Natl Acad Sci USA 96(6): 3006-11.
[0234] Tse, W., W. Beyer, et al. (2000). “Bone marrow derived mesenchymal stem cells suppress T cell activation without inducing allogeneic anergy.” Blood 96: 241a.
[0235] Uccelli, A., L. Moretta, et al. (2008). “Mesenchymal stem cells in health and disease.” Nature Reviews Immunology 8(9): 726-736.
[0236] Ullrich, A., I. Sures, et al. (1994). “The secreted tumor-associated antigen 90K is a potent immune stimulator.” J Biol Chem 269(28): 18401-7.
[0237] van Poll, D., B. Parekkadan, et al. (2008). “Mesenchymal Stem Cell Therapy for Protection and Repair of Injured Vital Organs.” Cellular and Molecular Bioengineering 1(1): 42-50.
[0238] Weir, C., A. McNeill, et al. (2006). “Critical role of preproenkephalin in experimental autoimmune encephalomyelitis.” J Neuroimmunol 179(1-2): 18-25.
[0239] White, T., E. Bennett, et al. (1995). “Purification and cDNA cloning of a human UDP-N-acetyl-alpha-D-galactosamine: polypeptide N-acetylgalactosaminyltransferase.” Journal of Biological Chemistry 270(41): 24156.
[0240] Yagi, H., B. Parekkadan, et al. (2009). “Long-Term Superior Performance of a Stem Cell/Hepatocyte Device for the Treatment of Acute Liver Failure.” Tissue Engineering Part A.
[0241] Zhang, W., W. Ge, et al. (2004). “Effects of mesenchymal stem cells on differentiation, maturation, and function of human monocyte-derived dendritic cells.” Stem Cells Dev 13(3): 263-71.
[0242] Zhu, G., M. Allende, et al. (1998). “Two soluble glycosyltransferases glycosylate less efficiently in vivo than their membrane bound counterparts.” Glycobiology 8(8): 831.

### EQUIVALENTS

[0243] The foregoing has been a description of certain non-limiting embodiments in accordance with the invention. Those skilled in the art will recognize, or be able to ascertain using no more than routine experimentation, many equivalents to the specific embodiments described herein. Those of ordinary skill in the art will appreciate that various changes and modifications to this description may be made without departing from the spirit or scope of the present invention, as defined in the following claims.

[0244] All literature and similar material cited in this application, including, but not limited to, patents, patent applications, articles, books, treatises, and web pages, regardless of the format of such literature and similar materials, are expressly incorporated by reference in their entirety.

[0245] It is to be understood that the invention encompasses all variations, combinations, and permutations in which one or more limitations, elements, clauses, descriptive terms, etc., from one or more of the claims or from relevant portions of the description is introduced into another claim. For example, any claim that is dependent on another claim can be modified to include one or more limitations found in any other claim that is dependent on the same base claim. Furthermore, where the claims recite a composition, it is to be understood that methods of using the composition for any of the purposes disclosed herein are included, and methods of making the composition according to any of the methods of making disclosed herein or other methods known in the art are included, unless otherwise indicated or unless it would be evident to one of ordinary skill in the art that a contradiction or inconsistency would arise. In addition, the invention encompasses compositions made according to any of the methods for preparing compositions disclosed herein.

[0246] Where elements are presented as lists, e.g., in Markush group format, it is to be understood that each subgroup of the elements is also disclosed, and any element(s) can be removed from the group. It should be understood that, in general, where the invention, or aspects of the invention, is/are referred to as comprising particular elements, features, steps, etc., certain embodiments or aspects consist, or consist essentially of, such elements, features, steps, etc.

[0247] Where ranges are given, endpoints are included. Furthermore, it is to be understood that unless otherwise indicated or otherwise evident from the context and/or the understanding of one of ordinary skill in the art, values that are expressed as ranges can assume any specific value within the stated ranges in different embodiments, to the tenth of the unit of the lower limit of the range. It is also to be understood that unless otherwise indicated or otherwise evident from the context and/or the understanding of one of ordinary skill in the art, values expressed as ranges can assume any subrange within the given range, wherein the endpoints of the subrange are expressed to the same degree of accuracy as the tenth of the unit of the lower limit of the range.

[0248] In addition, it is to be understood that any particular embodiment may be explicitly excluded from any one or more of the claims. Any embodiment, element, feature, application, or aspect of the compositions and/or methods (e.g., any marrow stromal cell [MSC] polypeptide, any characteristic sequence element of an MSC polypeptide, any method of manufacturing MSC polypeptides, any route or location of administration of MSC polypeptides and/or compositions thereof, any purpose for which a composition comprising MSC polypeptides is administered, etc.), can be excluded from any one or more claims. For purposes of brevity, all of the embodiments in which one or more elements, features, purposes, or aspects are excluded are not set forth explicitly herein.

The application's sequence listing, which the Patent Office published only in electronic form, follows.

SEQUENCE LISTING (439 sequences)

SEQ ID NO: 1 - protein, 16 aa, Artificial Sequence
  Synthetic
PAQGVVTTLENVSPPR

SEQ ID NO: 2 - protein, 21 aa, Artificial Sequence
  Synthetic
EINLAPDSSSVVVSGLMVATK

SEQ ID NO: 3 - protein, 19 aa, Artificial Sequence
  Synthetic
IYTSPTWSAFVTDSSWSAR

SEQ ID NO: 4 - protein, 17 aa, Artificial Sequence
  Synthetic
TLQALEFHTVPFQLLAR

SEQ ID NO: 5 - protein, 16 aa, Artificial Sequence
  Synthetic
YDALEVFAGSGTSGQR

SEQ ID NO: 6 - protein, 19 aa, Artificial Sequence
  Synthetic
GESGYVASEGFPNYLPPNK

SEQ ID NO: 7 - protein, 16 aa, Artificial Sequence
  Synthetic
VYTAQNPSAQALGLGK

SEQ ID NO: 8 - protein, 17 aa, Artificial Sequence
  Synthetic
EFDDDTYDNDIALLQLK

SEQ ID NO: 9 - protein, 23 aa, Artificial Sequence
  Synthetic
QFQADFTSLSDQEPLHVAQALQK

SEQ ID NO: 10 - protein, 10 aa, Artificial Sequence
  Synthetic
VFQQVAQASK

SEQ ID NO: 11 - protein, 20 aa, Artificial Sequence
  Synthetic
NLPSDSQDLGQHGLEEDFML

SEQ ID NO: 12 - protein, 13 aa, Artificial Sequence
  Synthetic
GPMFELLPGESNK

SEQ ID NO: 13 - protein, 21 aa, Artificial Sequence
  Synthetic
GGSDSDASLVITDLTLEDYGR

SEQ ID NO: 14 - protein, 5 aa, Artificial Sequence
  Synthetic
YGGFM

SEQ ID NO: 15 - protein, 5 aa, Artificial Sequence
  Synthetic
YGGFL

SEQ ID NO: 16 - protein, 34 aa, Homo sapiens
YGGFMKKMDELYPMEPEEEANGSEILAKRYGGFM

SEQ ID NO: 17 - protein, 25 aa, Artificial Sequence
  Synthetic
YGGFMRRVGRPEWWMDYQKRYGGFL

SEQ ID NO: 18 - protein, 31 aa, Homo sapiens
FAEALPSDEEGESYSKEVPEMEKRYGGFMRF

SEQ ID NO: 19 - protein, 105 aa, Artificial Sequence
  Synthetic
MRKFAYCKVVLATSLIWVLLDMFLLLYFSECNKCDEKKERGLPAGDVLEPVQKPHEGPGEMGKPVVIPKEDQEKMKEMFKINQFNLMASEMIALNRSLPDVRLEG

SEQ ID NO: 20 - protein, 585 aa, Artificial Sequence
  Synthetic
MTPPRLFWVWLLVAGTQGVNDGDMRLADGGATNQGRVEIFYRGQWGTVCDNLWDLTDASVVCRALGFENATQALGRAAFGQGSGPIMLDEVQCTGTEASLADCKSLGWLKSNCRHERDAGVVCTNETRSTHTLDLSRELSEALGQIFDSQRGCDLSISVNVQGEDALGFCGHTVILTANLEAQALWKEPGSNVTMSVDAECVPMVRDLLRYFYSRRIDITLSSVKCFHKLASAYGARQLQGYCASLFAILLPQDPSFQMPLDLYAYAVATGDALLEKLCLQFLAWNFEALTQAEAWPSVPTDLLQLLLPRSDLAVPSELALLKAVDTWSWGERASHEEVEGLVEKIRFPMMLPEELFELQFNLSLYWSHEALFQKKTLQALEFHTVPFQLLARYKGLNLTEDTYKPRIYTSPTWSAFVTDSSWSARKSQLVYQSRRGPLVKYSSDYFQAPSDYRYYPYQSFQTPQHPSFLFQDKRVSWSLVYLPTIQSCWNYGFSCSSDELPVLGLTKSGGSDRTIAYENKALMLCEGLFVADVTDFEGWKAATPSALDTNSSKSTSSFPCPAGHFNGFRTVIRPFYLTNSSGVD

SEQ ID NO: 21 - protein, 173 aa, Artificial Sequence
  Synthetic
MSLLGPKVLLFLAAFIITSDWIPLGVNSQRGDDVTQATPETFTEDPNLVNDPATDETVLAVLADIAPSTDDLASLSEKNTTAECWDEKFTCTRLYSVHRPVKQCIHQLCFTSLRRMYIVNKEICSRLVCKEHEAMKDELCRQMAGLPPRRLRRSNYFRLPPCENVDLQRPNGL

SEQ ID NO: 22 - protein, 267 aa, Artificial Sequence
  Synthetic
MARFLTLCTWLLLLGPGLLATVRAECSQDCATCSYRLVRPADISFLACVMECEGKLPSLKIWETCKELLQLSRPELPQDGTSTLRENSKPEESHLLAKRYGGFMKRYGGFMKKMDELYPMEPEEEANGSEILAKRYGGFMKKDAEEDDSLANSSDLLKELLETGDNRERSHHQDGSDNEEEVSKRYGGFMRGLKRSPQLEDEAKELQKRYGGFMRRVGRPEWWMDYQKRYGGFLKRFAEALPSDEEGESYSKEVPEMEKRYGGFMRF

SEQ ID NO: 23 - protein, 354 aa, Artificial Sequence
  Synthetic
MKSLLLLVLISICWADHLSDNYTLDHDRAIHIQAENGPHLLVEAEQAKVFSHRGGNVTLPCKFYRDPTAFGSGIHKIRIKWTKLTSDYLKEVDVFVSMGYHKKTYGGYQGRVFLKGGSDSDASLVITDLTLEDYGRYKCEVIEGLEDDTVVVALDLQGVVFPYFPRLGRYNLNFHEAQQACLDQDAVIASFDQLYDAWRGGLDWCNAGWLSDGSVQYPITKPREPCGGQNTVPGVRNYGFWDKDKSRYDVFCFTSNFNGRFYYLIHPTKLTYDVAVQACLNDGAQIAKVGQIFAAWKILGYDRCDAGWLADGSVRYPISRPRRRCSPTEAAVRFVGFPDKKHKLYGVYCFRAYN

SEQ ID NO: 24 - protein, 233 aa, Danio rerio
MACDLLGALLLFISVLESAVGLTLQPKEVCLLQIEEGTCNDDIQRFYYNTISQQCEEFSYSGCGGNQNNFRSFVECQKTCFRIPKIPQICRFQKKEGPCRGLFSRYFFNMTSMQCEPFTYGGCQGNENNFRNPEECIEYCKPPKTIPVICLDNLDKGRCSASIPRYYYNSATKTCEEFMYTGCGGSNNNFISKQSCVDVCGSKRWSPTKKSVRVSKQYLRRVKPQPSREKTNK

SEQ ID NO: 25 - protein, 235 aa, Homo sapiens
MDPARPLGLSILLLFLTEAALGDAAQEPTGNNAEICLLPLDYGPCRALLLRYYYDRYTQSCRQFLYGGCEGNANNFYTWEACDDACWRIEKVPKVCRLQVSVDDQCEGSTEKYFFNLSSMTCEKFFSGGCHRNRIENRFPDEATCMGFCAPKKIPSFCYSPKDEGLCSANVTRYYFNPRYRTCDAFTYTGCGGNDNNFVSREDCKRACAKALKKKKKMPKLRFASRIRKIRKKQF

SEQ ID NO: 26 - protein, 230 aa, Mus musculus
MDPAMPLQLWNLPLLLVGSVLGLTSVSAQGNNLEICLLPLDAGPCQALIPKFYYDRDQQKCRRFNYGGCLGNANNFHSRDLCQQTCGSIEKVPPVCRSELKTYPCDKPNIRFFFNLNTMTCEPLRPGLCSRTINVFSEEATCKGLCEPRKHIPSFCSSPKDEGLCSANVTRFYFNSRNKTCETFTYTGCGGNENNFYYLDACHRACVKGWKKPKRWKIGDFLPRFWKHLS

SEQ ID NO: 27 - protein, 234 aa, Bos taurus
MDSVRPLWLMLLSLLLVGTALGDASQAPPGNNAEICLLPPDDGPCRARIPSYYYDRYTQSCREFMYGGCEGNANNFETLEACNEACWKIEKVPKICRLKVNKKQCGELREQYFFNLSSMTCKKFISGGCHSNENRFPDEATCMDFCAPKRAPVFCYSPKDEGLCSANVTRYYFNPRHKACEAFNYTGCGGNDNNFVNLKDCKRTCVKALKKEKNKKMPRLLLANRRLKIKKKQF

SEQ ID NO: 28 - protein, 235 aa, Homo sapiens; identical to SEQ ID NO: 25

SEQ ID NO: 29 - protein, 186 aa, Homo sapiens
MDPARPLGLSILLLFLTEAALGDAAQEPTGNNAEICLLPLDYGPCRALLLRYYYDRYTQSCRQFLYGGCEGNANNFYTWEACDDACWRIEKVPKVCRLQVSVDDQCEGSTEKYFFNLSSMTCEKFFSGGCHRNRIENRFPDEATCMGFCAPKKNTEPVMLSPILAVEGMTITLLAGRIANVHVQKL

SEQ ID NO: 30 - protein, 224 aa, Homo sapiens
MDPARPLGLSILLLFLTEAALGDAAQEPTDYGPCRALLLRYYYDRYTQSCRQFLYGGCEGNANNFYTWEACDDACWRIEKVPKVCRLQVSVDDQCEGSTEKYFFNLSSMTCEKFFSGGCHRNRIENRFPDEATCMGFCAPKKIPSFCYSPKDEGLCSANVTRYYFNPRYRTCDAFTYTGCGGNDNNFVSREDCKRACAKALKKKKKMPKLRFASRIRKIRKKQF

SEQ ID NO: 31 - protein, 241 aa, Homo sapiens
MDPARPLGLSILLLFLTEAALGDAAQEPTGNNAEICLLPLDYGPCRALLLRYYYDRYTQSCRQFLYGGCEGNANNFYTWEACDDACWRIEKVPKVCRLQVSVDDQCEGSTEKYFFNLSSMTCEKFFSGGCHRNRIENRFPDEATCMGFCAPKKSKYDFYVPSFCYSPKDEGLCSANVTRYYFNPRYRTCDAFTYTGCGGNDNNFVSREDCKRACAKALKKKKKMPKLRFASRIRKIRKKQF

SEQ ID NO: 32 - protein, 224 aa, Xenopus laevis
MHTSSFQALMAASLLIQVFGAPMQGNTTVCLLPLDEGPCKALIPHYYYDRYTQTCQEFFYGGCDGNANNFVSMEDCEKFCWKIKKVPKACRMVPDEGPCRGYIKRYAYNMKTMRCEQFIYGGCYGNDNNFQDKDSCINFCAPRRDAPSFCYSPKDEGSCSASVTRYYFNIESKACEEFVYTGCGGNSNNFIKVEDCDSVCKKGTKRPRNQNPKIPRIRRPRIQS

SEQ ID NO: 33 - protein, 219 aa, Xenopus (Silurana) tropicalis
MHASLQALMAASLLIQVFGSPMQGNTTVCLLPPDEGPCKALIPHYYYDRYTQTCQEFLYGGCDGNSNKFLSMEDCEKFCWKIKKVPKACRMDPDEGPCRGFLKRYAYNMQTMKCEQFYYGGCYGNDNNFKDKASCMDFCSPRRDAPSFCYSPKDEGSCSASVTRYYFNIESKACEEFVYTGCGGNSNNFVKMEDCDSVCKKGSKRPRNRNRIRVPRIQS

SEQ ID NO: 34 - protein, 230 aa, Mus musculus; identical to SEQ ID NO: 26

SEQ ID NO: 35 - protein, 235 aa, Homo sapiens; identical to SEQ ID NO: 25

SEQ ID NO: 36 - protein, 235 aa, Homo sapiens; identical to SEQ ID NO: 25

SEQ ID NO: 37 - protein, 238 aa, Oncorhynchus mykiss
MELSSLIFLILSCSLCYVFALSPKQEVCLLQVDEGPCRGDIQRYYYNTITQQCEEFVYGGCQGNANNFMSFLACQKACFRIPKIPQICRFQKEVGPCRANFLSYFFNMITMQCEQFVYGGCQGNENRFQDQLSCMEYCRPHKTTPVLCLDPLDKGGCAASIPRYYYNSASRMCEQFIYSGCGGSSNNFISRQSCMDVCARAGKPWISRKTGRRAGMMRTTSKNRIRIKPNNNIKWSTI

SEQ ID NO: 38 - protein, 235 aa, Homo sapiens; identical to SEQ ID NO: 25

SEQ ID NO: 39 - protein, 233 aa, Danio rerio; identical to SEQ ID NO: 24

SEQ ID NO: 40 - protein, 233 aa, Danio rerio; identical to SEQ ID NO: 24

SEQ ID NO: 41 - protein, 354 aa, Homo sapiens; identical to SEQ ID NO: 23

SEQ ID NO: 42 - protein, 180 aa, Bos taurus
MKSLLLLVLISFCWADHHSDNYTVDHDRVIHIQAENGPRLLVEAEQAKVFSRRGGNVTLPCKFYRDPTAFGSGTHKIRIKWTKLTSDYLKEVDVFVSMGYHKKTYGGYHGRVFLKGGSDNDASLVITDLTLEDYGRYKCEVIEGLEDDTAVVALDLQGKYGVKLGMIINHCFFFMTSNVQ

SEQ ID NO: 43 - protein, 356 aa, Mus musculus
MRSLLLLVLISVCWADHHLSDSYTPPDQDRVIHIQAENGPRLLVEAEQAKVFSHRGGNVTLPCKFYRDPTAFGSGIHKIRIKWTKLTSDYLREVDVFVSMGYHKKTYGGYQGRVFLKGGSDNDASLVITDLTLEDYGRYKCEVIEGLEDDTAVVALELQGVVFPYFPRLGRYNLNFHEARQACLDQDAVIASFDQLYDAWRGGLDWCNAGWLSDGSVQYPITKPREPCGGQNTVPGVRNYGFWDKDKSRYDVFCFTSNFNGRFYYLIHPTKLTYDEAVQACLNDGAQIAKVGQIFAAWKLLGYDRCDAGWLADGSVRYPISRPRRRCSPTEAAVRFVGFPDKKHKLYGVYCFRAYN

SEQ ID NO: 44 - protein, 354 aa, Homo sapiens
MKSLLLLVLISICWADHLSDNYTLDHDRAIHIQAENGPHLLVEAEQAKVFSHRGGNVTLPCKFYRDPTAFGSGIHKIRIKWTKLTSDYLKEVDVFVSMGYHKKTYGGYQGRVFLKGGSDSDASLVITDLTLEDYGRYKCEVIEGLEDDTVVVALDLQGVVFPYFPRLGRYNLNFHEAQQACLDQDAVIASFDQLYDAWRGGLDWCNAGWLSDGSVQYPITKPREPCGGQNTVPGVRNYGFWDKDKSRYDVFCFTSNFNGRFYYLIHPTKLTYDEAVQACLNDGAQIAKVGQIFAAWKILGYDRCDAGWLADGSVRYPISRPRRRCSPTEAAVRFVGFPDKKHKLYGVYCFRAYN

SEQ ID NO: 45 - protein, 335 aa, Danio rerio
MIALFSVALMVFASSLHVEAQDSKSRVKVYANRGDNITLPCRLDGQSTLFGNRIKWTKIEDDSTETDVLISMGFHKKAYGSYQDRAYLLEVDDSDATLVITDLDVNDYGTYRCEFIDGMNDMTLEVDLEVQGKDSLSFTGVVFPYSPRLGRYNLNFQNAVAACQEQDAVVASFEQLYGEWKSGLDWCNAGWLSDGTVQYPITKPREPCGGARATAGLRNYGQRDNSNSRYDVFCFTGLKGRFYYMIQPKKLNFDEAVDACKGDGAEIAKVGHMFAAWKLQGYDRCDAGWLADGSVRYPISRPRKNCSPTEAAVRFVGFPDKKQKLYGVYCYKAQQ

SEQ ID NO: 46 - protein, 335 aa, Danio rerio; identical to SEQ ID NO: 45

SEQ ID NO: 47 - protein, 354 aa, Equus caballus
MKSLLLLVLISICGADHRSDNYTLDHDRVIHIQAENGPRLLVEAEQAKVFSHRGGNVTLPCKFLRDPTAFGSGTHKIRIKWTKLTSDYLKEVDVFVSMGYHKKTYGGYQGRVFLKGGSDNDASLVITDLTLDDYGRYKCEVIEGLEDDTAVVALDLQGVVFPYFPRLGRYNLNFHEAQQACLDQDAVIASFDQLYDAWRGGLDWCNAGWLSDGSVQYPITKPREPCGGQNTVPGVRNYGFWDKEKSRYDVFCFTSNFNGRFYYLIHPTKLTYDEAVQACLKDGAQIAKVGQIFAAWKLLGYDRCDAGWLADGSVRYPISRPRRRCSPTEAAVRFVGFPDKKHKLYGVYCFRAYN

SEQ ID NO: 48 - protein, 356 aa, Mus musculus
MRSLLLLVLISVCWADHHLSDSYTPPDQDRVIHIHAENGPRLLVEAEQAKVFSHRGGNVTLPCKFYRDPTAFGSGIHKIRIKWTKLTSDYLREVDVFVSMGYHKKTYGGYQGRVFLKGGSDNDASLVITDLTLEDYGRYKCEVIEGLEDDTAVVALELQGVVFPYFPRLGRYNLNFHEARQACLDQDAVIASFDQLYDAWRGGLDWCNAGWLSDGSVQYPITKPREPCGGQNTVPGVRNYGFWDKDKSRYDVFCFTSNFNGRFYYLIHPTKLTYDEAVQACLNDGAQIAKVGQIFAAWKLLGYDRCDAGWLADGSVRYPISRPRRRCSPTEAAVRFVGFPDKKHKLYGVYCFRAYN

SEQ ID NO: 49 - protein, 354 aa, Artificial Sequence; identical to SEQ ID NO: 44
  Synthetic

SEQ ID NO: 50 - protein, 300 aa, Homo sapiens
MKSLLLLVLISICWADHLSDNYTLDHDRAIHIQAENGPHLLVEAEQAKVFSHRGGNVTLPCKFYRDPTAFGSGIHKIRIKWTKLTSDYLKEVDVFVSMGYHKKTYGGYQGRVFLKGGSDSDASLVITDLTLEDYGRYKCEVIEGLEDDTVVVALDLQGVVFPYFPRLGRYNLNFHEAQQACLDQDAVIASFDQLYDAWRGGLDWCNAGWLSDGSVQYPITKPREPCGGQNTVPGVRNYGFWDKDKSRYDVFCFTSNFNGKIITVLPSFLSHRLFHTITLHLAFNLIFLEKQTKTSFEVLL

SEQ ID NO: 51 - protein, 354 aa, Homo sapiens; identical to SEQ ID NO: 44

SEQ ID NO: 52 - protein, 354 aa, Homo sapiens; identical to SEQ ID NO: 44

SEQ ID NO: 53 - protein, 343 aa, Rattus norvegicus
MRSLLFLVLISVCRADHLSDSYTPDQDRVIHIQAENGPRLLVEAEQAKVFSHRGGNVTLPCKFYRDPTAFGSGIHKIRIKWTKLTSDYLREVDVFVSMGYHKKTYGGYQGRVFLKGGSDNDASLIITDLTLEDYGRYKCEVIEGLEDDTAVVALELQGVVFPYFPRLGRYNLNFHEARQACLDQDAVIASFDQLYDAWRGGLDWCNAGWLSDGSVQYPITKPREPCGGQNTVPGVRNYGFWDKDKSRYDVFCFTSNFNVTYDEAVQACLNDGAQIAKVGQIFAAWKLLGYDRCDAGWLADGSVRYPISRPRRRCSPTEAAVRFVGFPDKKHKLYGVYCFRAYN

SEQ ID NO: 54 - protein, 356 aa, Mus musculus; identical to SEQ ID NO: 43

SEQ ID NO: 55 - protein, 354 aa, Rattus norvegicus
MRSLLFLVLISVCRADHLSDSYTPDQDRVIHIQAENGPRLLVEAEQAKVFSHRGGNVTLPCKFYRDPTAFGSGIHKIRIKWTKLTSDYLREVDVFVSMGYHKKTYGGYQGRVFLKGGSDNDASLIITDLTLEDYGRYKCEVIEGLEDDTAVVALELQGVVFPYFPRLGRYNLNFHEACQACLDQDAVIASFDQLYDAWRGGLDWCNAGWLSDGSVQYPITKPREPCGGQNTVPGVRNYGFWDKDKSRYDVFCFTSNFNGRFYYLIHPTKLTYDEAVQACLNDGAQIAKVGQIFAAWKLLGYDRCDAGWLADGSVRYPISRPRRRCSPTEAAVRFVGFPDKKHKLYGVYCFRAYN

SEQ ID NO: 56 - protein, 415 aa, Homo sapiens
MRGANAWAPLCLLLAAATQLSRQQSPERPVFTCGGILTGESGFIGSEGFPGVYPPNSKCTWKITVPEGKVVVLNFRFIDLESDNLCRYDFVDVYNGHANGQRIGRFCGTFRPGALVSSGNKMMVQMISDANTAGNGFMAMFSAAEPNERGDQYCGGLLDRPSGSFKTPNWPDRDYPAGVTCVWHIVAPKNQLIELKFEKFDVERDNYCRYDYVAVFNGGEVNDARRIGKYCGDSPPAPIVSERNELLIQFLSDLSLTADGFIGHYIFRPKKLPTTTEQPVTTTFPVTTGLKPTVALCQQKCRRTGTLEGNYCSSDFVLAGTVITTITRDGSLHATVSIINIYKEGNLAIQQAGKNMSARLTVVCKQCPLLRRGLNYIIMGQVGEDGRGKIMPNSFIMMFKTKNQKLLDALKNKQC

SEQ ID NO: 57 - protein, 415 aa, Homo sapiens; identical to SEQ ID NO: 56

SEQ ID NO: 58 - protein, 414 aa, Rattus norvegicus
MGGASACFPLCLLLAAAQLARPQTPERPVFTCGGILTGESGFIGSEGFPGMYPPNSKCTWKITVPEGKVVVLNFRFIDLENDNLCRYDFVDVYNGHANGQRIGRFCGTFRPGSLVASGNKMMVQMISDANTAGSGFMATFSAAAPDGKGDRYCGGRLEKPSGSFKTPNWPDRDYPVGVTCVWHIIAPKNQLIELKFEKFDVERDNYCRYDYVAVFNGGEVNDAKRIGKYCGDSPPVPIVSEKNELLIQFLSDLSLTADGFIGHYKFRPKKFPTTTATPVTTTFPVTIGLKPTVALCQQKCRRMGTLESNYCSSNFVLAGTVITTATRGGSLLATVSIISIYREGNLAIQQAGKNMSVKLTVVCRQCPLLRRGLNYIIMGQVGEDGRGKIMPNSFVKMFKNKNQKPMNALKNKQC

SEQ ID NO: 59 - protein, 414 aa, Mus musculus
MGGASACIPLCLLLATARMARPQTPERPVFTCGGILTGESGFIGSEGFPGMYPPNSKCTWKITVPEGKVVVLNFRFIDLENDNLCRYDFVDVYNGHANGQRIGRFCGTFRPGSLVASGNKMTVQMISDANTAGSGFMATYSAAAPDGKGDRYCGGRLEKPSGTFKTPNWPDRDYPVGVTCVWHIIAPKNQLIELKFEKFDVERDNYCRYDYVAVFNGGEVNDAKRIGKYCGDSPPVPIVSERNELLIQFLSDLSLTADGFIGHYKFRPKKFPTTTTTPVTTTLPVTTGLKPTVALCQQKCRRMGTLESNYCSSNFVLAGTVITTVTRGGSLHATVSIISIYREGNLAIQQAGKNMSVKLTVVCRQCPLLRRGLNYIIMGQVGEDGRGKIMPNSFVKMFKNKNQKPMNALKNKQC

SEQ ID NO: 60 - protein, 415 aa, Homo sapiens; identical to SEQ ID NO: 56

SEQ ID NO: 61 - protein, 414 aa, Mus musculus
MGGASACIPLCLLLATARMARPQTPERPVFTCGGILTGESGFIGSEGFPGMYPPNSKCTWKITVPEGKVVVLNFRFIDLENDNLCRYDFVDVYNGHANGQRIGRFCGTFRPGSLVASGNKMTVQMISDANTAGSGFMATYSAAAPDGKGDRYCGGRLEKPSGTFKTSNWPDRDYPVGVTCVWHIIAPKNQLIELKFEKFDVERDNYCRYDYVAVFNGGEVNDAKRIGKYCGDSPPVPIVSERNELLIQFLSDLSLTADGFIGHYKFRPKKFPTTTTTPVTTTLPVTTGLKPTVALCQQKCRRMGTLESNYCSSNFVLAGTVITTVTRGGSLHATVSIISIYREGNLAIQQAGKNMSVKLTVVCRQCPLLRRGLNYIIMGQVGEDGRGKIMPNSFVKMFKNKNQKPMNALKNKQC

SEQ ID NO: 62 - protein, 415 aa, Homo sapiens; identical to SEQ ID NO: 56

SEQ ID NO: 63 - protein, 415 aa, Homo sapiens; identical to SEQ ID NO: 56

SEQ ID NO: 64 - protein, 415 aa, Homo sapiens; identical to SEQ ID NO: 56

SEQ ID NO: 65 - protein, 414 aa, Mus musculus; identical to SEQ ID NO: 59

SEQ ID NO: 66 - protein, 416 aa, Xenopus (Silurana) tropicalis
MSWFLGSLLLLLLLILLPYGIPGQQLNERQTFTCGGNLTGDTGVLGSEGFPGVYPPNSKCTWKITVPEGKVVVLSFRFIDLESDNLCRYDFVDVYNGHSNVHRIGRFCGTFRPGALVSNSNKMLVQMISDANTAGNGFIAVFSAAEPNERGDQYCGGRLDKPSGSFQTPNWPERDYPAGVTCSWHIVAPKHQVIELKFEKFDVERDNYCRYDYVAVFNGGEINDAKRIGKFCGDSPPAPIVSERNELLIQFLSDLSLTADGFKAHYRFRPKKLPTTTVSPITTPAATTPSLKPTLALCQQKCKRTGTLESNYCSSNFVITGTIITTVSRSGSVYATISIINVYKEGTLAIQQAGKNMSAKITVVCKQCPMVRRGLNYIIMGQVDEDGRAKVLPSSYVMTFKTKNQKILNTLKNKRC

SEQ ID NO: 67 - protein, 416 aa, Bos taurus
MRGAGAWAPLCLLLVAAAQHSRPQLSERPVFTCGGILTGESGFIGSEGFPGVYPPNSKCTWKITVPEGKVVVLNFRFIDLESDNLCRYDFVDVYNGHANGQRIGRFCGTFRPGALVSSSNKMMVQMISDANTAGNGFMAMFSAAEPNERGDQYCGGLLERPSGSFKTPNWPDRDYPAGVTCVWHIVAPKNQLIELKFEKFDVERDNYCRYDYVAVFNGGEINDAERIGKYCGDSPPAPIVSERNELLIQFLSDLSLTADGFIGHYKFRPKKLPTTTALPVTTTFPVSTTSLKPTVALCQQKCRRSGTLGSNYCSSNFVLAGTVITTIPRGGSLHATVSIINIYKEGNLAIQQAGKNMSAKVLVVCKQCPLLRRGLNYIIMGQVGEDGRGKIMPNSFIMMFKTKNQKLLDALKNKQC

SEQ ID NO: 68 - protein, 415 aa, Artificial Sequence; identical to SEQ ID NO: 56
  Synthetic

SEQ ID NO: 69 - protein, 416 aa, Xenopus (Silurana) tropicalis; identical to SEQ ID NO: 66

SEQ ID NO: 70 - protein, 414 aa, Rattus norvegicus; identical to SEQ ID NO: 58

SEQ ID NO: 71 - protein, 416 aa, Bos taurus; identical to SEQ ID NO: 67

SEQ ID NO: 72 - protein, 415 aa, Artificial Sequence; identical to SEQ ID NO: 56
  Synthetic

SEQ ID NO: 73 - protein, 414 aa, Mus musculus; identical to SEQ ID NO: 59

SEQ ID NO: 74 - protein, 412 aa, Xenopus laevis
MSCFLGSLLLLLLLPYGISGQPNERQTFTCGGNLTGDTGVLGSEGFPGVYPPNSKCTWKITVPEGKVVVLSFRFIDLESDNLCRYDFVDVYNGHSNVHRIGRFCGTFRPGALVSNSNKMLVQMISDANTAGNGFIAVFSAAEPNEREDQYCGGRLDKPSGSFQTPNWPERDYPAGVTCSWHIVAPKHQVIELKFEKFDVERDNYCRYDYVAVFNGGEINDAKRIGKFCGDSPPAPIVSERNELLIQFLSDLSLTADGFKGHYRFRPKKLPTTTVSPVTTPATTTSSLKTTLALCQQKCKRTGTLESNYCSSNFVITGTIITTVSRGGSVYATISIISVYKEGTLAIQQAGKNMSAKITVVCKQCPMVRRGLNYIIMGQVDEDGRAKVLPSNYVMTFKTKNQKLLNTLKNKRC

SEQ ID NO: 75 - protein, 416 aa, Xenopus (Silurana) tropicalis; identical to SEQ ID NO: 66

SEQ ID NO: 76 - protein, 1789 aa, Homo sapiens
PRHVKLLSTKMGLKVTWDPPKDATSRPVEHYNIAYGKSLKSLKYIKVNAETYSFLIEDVEPGVVYFVLLTAENHSGVSRPVYRAESPPGGEWIEIDGFPIKGPGPFNETVTEKEVPNKPLRVRVRSSDDRLSVAWKAPRLSGAKSPRRSRGFLLGYGESGRKMNYVPLTRDERTHEIKKLASESVYVVSLQSMNSQGRSQPVYRAALTKRKISEEDELDVPDDISVRVMSSQSVLVSWVDPVLEKQKKVVASRQYTVRYREKGELARWDYKQIANRRVLIENLIPDTVYEFAVRISQGERDGKWSTSVFQRTPESAPTTAPENLNVWPVNGKPTVVAASWDALPETEGKVKASKADVEQNTEDNGKPEKPEPSSPSPRAPASSQHPSVPASPQGRNAKDLLLDLKNKILANGGAPRKPQLRAKKAEELDLQSTEITGEEELGSREDSPMSPSDTQDQKRTLRPPSRHGHSVVAPGRTAVRARMPALPRREGVDKPGFSLATQPRPGAPPSASASPAHHASTQGTSHRPSLPASLNDNDLVDSDEDERAVGSLHPKGAFAQPRPALSPSRQSPSSVLRDRSSVHPGAKPASPARRTPHSGAAEEDSSASAPPSRLSPPHGGSSRLLPTQPHLSSPLSKGGKDGEDAPATNSNAPSRSTMSSSVSSHLSSRTQVSEGAEASDGESHGDGDREDGGRQAEATAQTLRARPASGHFHLLRHKPFAANGRSPSRFSIGRGPRLQPSSSPQSTVPSRAHPRVPSHSDSHPKLSSGIHGDEEDEKPLPATVVNDHVPSSSRQPISRGWEDLRRSPQRGASLHRKEPIPENPKSTGADTHPQGKYSSLASKAQDVQQSTDADTEGHSPKAQPGSTDRHASPARPPAARSQQHPSVPRRMTPGRAPQQQPPPPVATSQHHPGPQSRDAGRSPSQPRLSLTQAGRPRPTSQGRSHSSSDPYTASSRGMLPTALQNQDEDAQGSYDDDSTEVEAQDVRAPAHAARAKEAAASLPKHQQVESPTGAGAGGDHRSQRGHAASPARPSRPGGPQSRARVPSRAAPGKSEPPSKRPLSSKSQQSVSAEDDEEEDAGFFKGGKEDLLSSSVPKWPSSSTPRGGKDADGSLAKEEREPAIALAPRGGSLAPVKRPLPPPPGSSPRASHVPSRLPPRSAATVSPVAGTHPWPQYTTRAPPGHFSTTPMLSLRQRMMHARFRNPLSRQPARPSYRQGYNGRPNVEGKVLPGSNGKPNGQRIINGPQGTKWVVDLDRGLVLNAEGRYLQDSHGNPLRIKLGGDGRTIVDLEGTPVVSPDGLPLFGQGRHGTPLANAQDKPILSLGGKPLVGLEVIKKTTHPPTTTMQPTTTTTPLPTTTTPRPTTATTRRTTTTRRTTTRRPTTTVRTTTRTTTTTTPTPTTPIPTCPPGTLERHDDDGNLIMSSNGIPECYAEEDEFSGLETDTAVPTEEAYVIYDEDYEFETSRPPTTTEPSTTATTPRVIPEEGAISSFPEEEFDLAGRKRFVAPYVTYLNKDPSAPCSLTDALDHFQVDSLDEIIPNDLKKSDLPPQHAPRNITVVAVEGCHSFVIVDWDKATPGDVVTGYLVYSASYEDFIRNKWSTQASSVTHLPIENLKPNTRYYFKVQAQNPHGYGPISPSVSFVTESDNPLLVVRPPGGEPIWIPFAFKHDPSYTDCHGRQYVKRTWYRKFVGVVLCNSLRYKIYLSDNLKDTFYSIGDSWGRGEDHCQFVDSHLDGRTGPQSYVEALPTIQGYYRQYRQEPVRFGNIGFGTPYYYVGWYECGVSIPGKW

SEQ ID NO: 77 - protein, 1842 aa, Homo sapiens
MGLKVTWDPPKDATSRPVEHYNIAYGKSLKSLKYIKVNAETYSFLIEDVEPGVVYFVLLTAENHSGVSRSVYRAESPPGGEWIEIDGFPIKGPGPFNETVTEKEVPNKPLRVRVRSSDDRLSVAWKAPRLSGAKSPRRSRGFLLGYGESGRKMNYVPLTRDERTHEIKKLASESVYVVSLQSMNSQGRSQPVYRAALTKRKISEEDELDVPDDISVRVMSSQSVLVSWVDPVLEKQKKVVASRQYTVRYREKGELARWDYKQIANRRVLIENLIPDTVYEFAVRISQGERDGKWSTSVFQRTPESAPTTAPENLNVWPVNGKPTVVAASWDALPETEGKVKEYILSYAPALKPFGAKSLTYPGDTTSALVDGLQPGERYLFKIRAANRRGLGPHSKAFIVAMPTTSKADVEQNTEDNGKPEKPEPSSPSPRAPASSQHPSVPASPQGRNAKDLLLDLKNKILANGGAPRKPQLRAKKAEELDLQSTEITGEEELGSREDSPMSPSDTQDQKRTLRPPSRHGHSVVAPGRTAVRARMPALPRREGVDKPGFSLATQPRPGAPPSASASPAHHASTQGTSHRPSLPASLNDNDLVDSDEDERAVGSLHPKGAFAQPRPALSPSRQSPSSVLRDRSSVHPGAKPASPARRTPHSGAAEEDSSASAPPSRLSPPHGGSSRLLPTQPHLSSPLSKGGKDGEDAPATNSNAPSRSTMSSSVSSHLSSRTQVSEGAEASDGESHGDGDREDGGRQAEATAQTLRARPASGHFHLLRHKPFAANGRSPSRFSIGRGPRLQPSSSPQSTVPSRAHPRVPSHSDSHPKLSSGIHGDEEDEKPLPATVVNDHVPSSSRQPISRGWEDLRRSPQRGASLHRKEPIPENPKSTGADTHPQGKYSSLASKAQDVQQSTDADTEGHSPKAQPGSTDRHASPARPPAARSQQHPSVPRRMTPGRAPQQQPPPPVATSQHHPGPQSRDAGRSPSQPRLSLTQAGRPRPTSQGRSHSSSDPYTASSRGMLPTALQNQDEDAQGSYDDDSTEVEAQDVRAPAHAARAKEAAASLPKHQQVESPTGAGAGGDHRSQRGHAASPARPSRPGGPQSRARVPSRAAPGKSEPPSKRPLSSKSQQSVSAEDDEEEDAGFFKGGKEDLLSSSVPKWPSSSTPRGGKDADGSLAKEEREPAIALAPRGGSLAPVKRPLPPPPGSSPRASHVPSRLPPRSAATVSPVAGTHPWPQYTTRAPPGHFSTTPMLSLRQRMMHARFRNPLSRQPARPSYRQGYNGRPNVEGKVLPGSNGKPNGQRIINGPQGTKWVVDLDRGLVLNAEGRYLQDSHGNPLRIKLGGDGRTIVDLEGTPVVSPDGLPLFGQGRHGTPLANAQDKPILSLGGKPLVGLEVIKKTTHPPTTTMQPTTTTTPLPTTTTPRPTTATTRRTTTTRRTTTRRPTTTVRTTTRTTTTTTPTPTTPIPTCPPGTLERHDDDGNLIMSSNGIPECYAEEDEFSGLETDTAVPTEEAYVIYDEDYEFETSRPPTTTEPSTTATTPRVIPEEGAISSFPEEEFDLAGRKRFVAPYVTYLNKDPSAPCSLTDALDHFQVDSLDEIIPNDLKKSDLPPQHAPRNITVVAVEGCHSFVIVDWDKATPGDVVTGYLVYSASYEDFIRNKWSTQASSVTHLPIENLKPNTRYYFKVQAQNPHGYGPISPSVSFVTESDNPLLVVRPPGGEPIWIPFAFKHDPSYTDCHGRQYVKRTWYRKFVGVVLCNSLRYKIYLSDNLKDTFYSIGDSWGRGEDHCQFVDSHLDGRTGPQSYVEALPTIQGYYRQYRQEPVRFGNIGFGTPYYYVGWYECGVSIPGKW

SEQ ID NO: 78 - protein, 1773 aa, Homo sapiens
MGLKVTWDPPKDATSRPVEHYNIAYGKSLKSLKYIKVNAETYSFLIEDVEPGVVYFVLLTAENHSGVSRPVYRAESPPGGEWIEIDGFPIKGPGPFNETVTEKEVPNKPLRVRVRSSDDRLSVAWKAPRLSGAKSPRRSRGFLLGYGESGRKMNYVPLTRDERTHEIKKLASESVYVVSLQSMNSQGRSQPVYRAALTKRKISEEDELDVPDDISVRVMSSQSVLVSWVDPVLEKQKKVVASRQYTVRYREKGELARWDYKQIANRRVLIENLIPDTVYEFAVRISQGERDGKWSTSVFQRTPESAPTTAPENLNVWPVNGKPTVVAASWDALPETEGKVKASKADVQQNTEDNGKPEKPEPSSPSPRAPASSQHPSVPASPQGRNAKDLLLDLKNKILANGGAPRKPQLRAKKAEELDLQSTEITGEEELGSREDSPMSPSDTQDQKRTLRPPSRHGHSVVAPGRTAVRARMPALPRREGVDKPGFSLATQPRPGAPPSASASPAHHASTQGTSHRPSLPASLNDNDLVDSDEDERAVGSLHPKGAFAQPRPALSPSRQSPSSVLRDRSSVHPGAKPASPARRTPHSGAAEEDSSASAPPSRLSPPHGGSSRLLPTQPHLSSPLSKGGKDGEDAPATNSNAPSRSTMSSSVSSHLSSRTQVSEGAEASDGESHGDGDREDGGRQAEATAQTLRARPASGHFHLLRHKPFAANGRSPSRFSIGRGPRLQPSSSPQSTVPSRAHPRVPSHSDSHPKLSSGIHGDEEDEKPLPATVVNDHVPSSSRQPISRGWEDLRRSPQRGASLHRKEPIPENPKSTGADTHPQGKYSSLASKAQDVQQSTDADTEGHSPKAQPGSTDRHASPARPPAARSQQHPSVPRRMTPGRAPEQQPPPPVATSQHHPGPQSRDAGRSPSQPRLSLTQAGRPRPTSQGRSHSSSDPYTASSRGMLPTALQNQDEDAQGSYDDDSTEVEAQDVRAPAHAARAKEAAASLPKHQQVESPTGAGAGGDHRSQRGHAASPARPSRPGGPQSRARVPSRAAPGKSEPPSKRPLSSKSQQSVSAEDEEEEDAGFFKGGKEDLLSSSVPKWPSSSTPRGGKDADGSLAKEEREPAIALAPRGGSLAPVKRPLPPPPGSSPRASHVPSRPPPRSAATVSPVAGTHPWPRYTTRAPPGHFSTTPMLSLRQRMMHARFRNPLSRQPARPSYRQGYNGRPNVEGKVLPGSNGKPNGQRIINGPQGTKWVVDLDRGLVLNAEGRYLQDSHGNPLRIKLGGDGRTIVDLEGTPVVSPDGLPLFGQGRHGTPLANAQDKPILSLGGKPLVGLEVIKKTTHPPTTTMQPTTTTTPLPTTTTPRPTTATTRRTTTRRPTTTVRTTTRTTTTTTPKPTTPIPTCPPGTLERHDDDGNLIMSSNGIPECYAEEDEFSGLETDTAVPTEEAYVIYDEDYEFETSRPPTTTEPSTTATTPRVIPEEGAISSFPEEEFDLAGRKRFVAPYVTYLNKDPSAPCSLTDALDHFQVDSLDEIIPNDLKKSDLPPQHAPRNITVVAVEGCHSFVIVDWDKATPGDVVTGYLVYSASYEDFIRNKWSTQASSVTHLPIENLKPNTRYYFKVQAQNPHGYGPISPSVSFVTESDNPLLVVRPPGGEPIWIPFAFKHDPSYTDCHGRQYVKRTWYRKFVGVVLCNSLRYKIYLSDNLKDTFYSIGDSWGRGEDHCQFVDSHLDGRTGPQSYVEALPTIQGYYRQYRQEPVRFGNIGFGTPYYYVGWYECGVSIPGKW

SEQ ID NO: 79 - protein, 1322 aa, Homo sapiens [sequence omitted]

SEQ ID NO: 80 - protein, 1894 aa, Homo sapiens
MAPEAGATLRAPRRLSWAALLLLAALLPVASSAAASVDHPLKPRHVKLLSTKMGLKVTWDPPKDATSRPVEHYNIAYGKSLKSLKYIKVNAETYSFLIEDVEPGVVYFVLLTAENHSGVSRPVYRAESPPGGEWIEIDGFPIKGPGPFNETVTEKEVPNKPLRVRVRSSDDRLSVAWKAPRLSGAKSPRRSRGFLLGYGESGRKMNYVPLTRDERTHEIKKLASESVYVVSLQSMNSQGRSQPVYRAALTKRKISEEDELDVPDDISVRVMSSQSVLVSWVDPVLEKQKKVVASRQYTVRYREKGELARWDYKQIANRRVLIENLIPDTVYEFAVRISQGERDGKWSTSVFQRTPESAPTTAPENLNVWPVNGKPTVVAASWDALPETEGKVKEYILSYAPALKPFGAKSLTYPGDTTSALVDGLQPGERYLFKIRATNRRGLGPHSKAFIVAMPTTSKADVEQNTEDNGKPEKPEPSSPSPRAPASSQHPSVPASPQGRNAKDLLLDLKNKILANGGAPRKPQLRAKKAEELDLQSTEITGEEELGSREDSPMSPSDTQDQKRTLRPPSRHGHSVVAPGRTAVRARMPALPRREGVDKPGFSLATQPRPGAPPSASASPAHHASTQGTSHRPSLPASLNDNDLVDSDEDERAVGSLHPKGAFAQPRPALSPSRQSPSSVLRDRSSVHPGAKPASPARRTPHSGAAEEDSSASAPPSRLSPPHGGSSRLLPTQPHLSSPLSKGGKDGEDAPATNSNAPSRSTMSSSVSSHLSSRTQVSEGAEASDGESHGDGDREDGGRQAEATAQTLRARPASGHFHLLRHKPFAANGRSPSRFSIGRGPRLQPSSSPQSTVPSRAHPRVPSHSDSHPKLSSGIHGDEEDEKPLPATVVNDHVPSSSRQPISRGWEDLRRSPQRGASLHRKEPIPENPKSTGADTHPQGKYSSLASKAQDVQQSTDADTEGHSPKAQPGSTDRHASPARPPAARSQQHPSVPRRMTPGRAPQQQPPPPVATSQHHPGPQSRDAGRSPSQPRLSLTQAGRPRPTSQGRSHSSSDPYTASSRGMLPTALQNQDEDAQGSYDDDSTEVEAQDVRAPAHAARAKEAAASLPKHQQVESPTGAGAGGDHRSQRGHAASPARPSRPGGPQSRARVPSRAAPGKSEPPSKRPLSSKSQQSVSAEDDEEEDAGFFKGGKEDLLSSSVPKWPSSSTPRGGKDADGSLAKEEREPAIALAPRGGSLAPVKRPLPPPPGSSPRASHVPSRLPPRSAATVSPVAGTHPWPQYTTRAPPGHFSTTPMLSLRQRMMHARFRNPLSRQPARPSYRQGYNGRPNVEGKVLPGSNGKPNGQRIINGPQGTKWVVDLDRGLVLNAEGRYLQDSHGNPLRIKLGGDGRTIVDLEGTPVVSPDGLPLFGQGRHGTPLANAQDKPILSLGGKPLVGLEVIKKTTHPPTTTMQPTTTTTPLPTTTTPRPTTATTRRTTTTRRTTTRRPTTTVRTTTRTTTTTTPTPTTPIPTCPPGTLERHDDDGNLIMSSNGIPECYAEEDEFSGLETDTAVPTEEAYVIYDEDYEFETSRPPTTTEPSTTATTPRVIPEEGAISSFPEEEFDLAGRKRFVAPYVTYLNKDPSAPCSLTDALDHFQVDSLDEIIPNDLKKSDLPPQHAPRNITVVAVEGCHSFVIVDWDKATPGDVVTGYLVYSASYEDFIRNKWSTQASSVTHLPIENLKPNTRYYFKVQAQNPHGYGPISPSVSFVTESDNPLLVVRPPGGEPIWIPFAFKHDPSYTDCHGRQYVKRTWYRKFVGVVLCNSLRYKIYLSDNLKDTFYSIGDSWGRGEDHCQFVDSHLDGRTGPQSYVEALPTIQGYYRQYRQEPVRFGNIGFGTPYYYVGWYECGVSIPGKW

SEQ ID NO: 81 - protein, 1732 aa, Mus musculus
MGLKVTWDPPKDASSRPVEYYNIAYGKSLKSLKSIKVNAETHSFLIKDVEKEVPNKPLRMRVRASDDRLSVAWKAPRLSGAKSPRRSRGFLLGYGESGRKMNYVPLTRDERSHEIKKLASESVYVVSLQSTNSQGQSQPVYRAALTKRKHAEEDELDVPEDISVRVMSSQSVLVAWVDPLVEKQKRVVASRQYTVRYREKGESARWDYKQVSNRRVLVDSLIPDTVYEFAVRISQGERDGKWSASIFQRTPESAPTTAPENLRVWPVSGKPTVVTVSWDALPESEGKVKEYILSYAPALKPFGAKSLTFSGHTTSALVDGLQPGERYLFKIRATNRRGPGPHSKAFIVAIPTTSSTEASAQPNGRDSSRKPEKLQQPSSPAPKVAASSEHTPSAKNVKDALSDLNKIRTNSVVPGKTQLHSKMGELDPQSTEVTGEEELDSLEDPRSSRLETLNQKQPLRVPSRSGHGVLTPGRTPARTGLPVLPRKEVMDRRGPSLDPHLRPRVEPSASSAYHQLSSIDNDSVDQNEYDQAGSPDPKAVSSPSSPKNPARSRLTSVPSRHAASNMLRDKSRMQPGTKASSSSASSQSHSSTSEEDSSAAAQPRSHSLLQGGSSRPALSRDRQDVHASSSRMPSQTVSSSRPSALTEGSEEEDTSDGGADIDRAAGDTRRRAEATAQIQQTRPALGHFSLIRNKPFPAHSRNPSRFPKLRGPRLQPSRSPQSTSASKVLTRAPSLPASHTRPGSDVYGDGEDEEPLPATVVNDRTPSSSSHPISGGSDTLRRGSQRGASLYRKEPIPENSKAAGADVHPGGKSPLSSKAQGFQLSTDEGAPQTPPSSTSRQLSPARHPASRSQPSPGSTVPRRMAPGRSSELSSSQSKDRSLSQPKLSLAHTGPDRPHAANSRGVLPSAPQNQNEGSQSSYEDNSTEIEGPDPRAPTHSAHAKDTTPSILKPQQMGSQSGNSGNRPQPSRSGASERPIRPGSTHPRVQVPGRAGLQATPAKKISSSKHPLPPESQQSVFTEEEEENEGILKGKEDSLSTSVKKWPSSSSPRNNKYADRNLDRDKAAIGQLVQEEDSIPGRRSPGSPPIASHPPTWYQPRNPVTASPSASTHSWPRYTTRAPSTYSSTTPMLSLRQRMQRRFRTPVSRQPPPRPVLTSGYNGRANVGENIPPGSIGKPNGQRIINGPQGTKWVVDLDRGLVLNAEGRYLQDSHGNPLRVRLGGDGRTIVDLGGTPMVSPDGLPLFGQGRHGKPVASAQDKPILSLGGKPLVGLEVIKTTTYSPTTTMLPTTTTTTVLTTTTRPPTTTTTTTRRTTTRRTTTTRHPTTTIRATRRTTTTTTTPEPTTPSPTCPPGTLEHQDEAGNLIMGSNGIPECYPEEDDFSGLETDTAPPTEEDYVVYDDDYGFETTRPPTSTMPSTTAATPKVIPEQGTVSSFPEEEFDLAGKRRFVAPYVTYLSKDPTAPCSLTDALDHFQVESLDELIPNDLTKSDLPPQHAPRNITVVAMEGCHSFVIVDWNKAIPGDVVTGYLVYSASYEDFIRNKWSTQTSSVTHLPIENLKPNTRYYFKVQAKNPHGYGPVSPSVSFVTESDNPLLVVRPPGGEPIWIPFAFKHDPGYTDCHGRQYVKRTWYKKFVGVVLCNSLRYKIYLSDNLKDTFYSIGDSWGRGEDHCQFVDSHLDGRTGPQSYIEALPNIQGYYRQYRQEPVSFGHIGFGTPYYYVGWYECGVSIPGKW

SEQ ID NO: 82 - protein, 1730 aa, Rattus norvegicus
MGLKVTWDPPKDATSRPVEHYNIAYGKSLKSLKSIKVNAETHSFLIKDVEKEVPNKPLRMRVRASDDRLSVAWKAPRLSGAKSPRRSRGFLLGYGESGRKMNYVPLTRDERSHEIKKLASESVYVVSLQSTNSQGQSQPVYRAALTKRKNAEEDELDVPEDISVRVMSSQSVLVAWVDPLVEKQKRVVASRQYTVRYREKGESARWDYKQVSNRRALVDSLIPDTVYEFAVRISQGERDGKWSASVFQRTPESAPTTAPENLRVWPVNGKPTVVTVSWDALPESEGKVKEYILSYAPALKPFGAKSLTFSGHTTSALVDGLQPGERYLFKIRATNRRGQGPHSKAFIVAIPTTSSTEASVQPNGRDNGKPEKPQQPSSSAPKVAASSQHTPSAKNVKDALSDLKNKIQTNGVAPGRTQLHSKVGELDPQSTEVTGEEELDSLEDPRSSRLETLNQKQPLRVPSRSGHGALAPGRTPARAGLPVLSRKEGMDRRGPSLDPHPHPRVEPSASSAYHQLSSTDNDSVDRKEDDQAGSPDPKAASSGSSPKNPGRSRPTSAPSRHAASNMLRDKSRVHPGTKAASSSTSRQSHSSTSEEDSSAQPSRHFPLHRGSSTSPLSRGWKDRQDTHASSSHTTSRTASSSHPSALTEGSEEEDGGADSDRAAEDTIRRAEATAQIQQTRPGLGHFSLIRNKPFTPHSRNPNRFPRLRGPRLQPSVSPQSTSASKVLTRSPSLPASHTRPGSDVYGDGEDEEPLPATVINDRTPSYPRHPISGSSDTLRRGPQRGASLYRKEPIPENSKAAGADVPPGGRSPLSSKAQGFQQSTTDEGAPQTSPASTSRQPSPARPPASRSQPSPGSTVPRRMTPDRSSELSSSQSKDRSLSQPKLSVAHAGHDHPHTANSRGVLPSAPQNQNEGAQSTYEDNSTEIEGPDSRTPTHSARAKDTTPPILKPRQVGSQSWSSDNRPQRSQAGASERPIRPGSTHPRAQVPGRAGVQATSVKKVSPSKRPLPLESQQSVFAEEEEENEGMLKGKEDSLSTSVKKWPSSSSPRDKYADRNLDKDKAAIGLLVQEENTVPGRRPPGSPAIASHPSTRHQPRNPATASPIANTHSWPRYTTRAPSSYSSTTPMLSLRQRMQRRFRTPVSRQPPPPRPVLTPGYNGRPNAEENIPPGSIGKPNGQRIINGPQGTKWVVDLDRGLVLNAEGRYLQDSHGNPLRVRLGGDGRTIVDLGGTPMVSPDGLPLFGQGRHGKPVASAQDKPILSLGGKPLVGLEVVRTTTQVPTTTMPPSTTTTTVPPTTTLPPTTTTTRRTTTTRRTTTTRRPTTTTRATRRTTTTTTTPEPTTPSPTCPPGTLEHRDEAGNLIMGSNGIPECYLEEDDFSGLEIDTALPTEEDYVVYDDDYGLETTRPPTSTMPSTTAATPKVVPEQGTVSSFPEEEFDLAGKRRFVAPYVTYLSKDPAAPCSLTDALDHFQVESLDELIPNDLTKNDLPPQHAPRNITVVAMEGCHSFVIVDWNKAIPGDVVTGYLVYSASYEDFIRNKWSTQTSSVTHLPIENLKPNTRYYFKVQAKNPHGYGPVSPSVSFVTESDNPLLVVRPPGGEPIWIPFAFKHDPGYTDCHGRQYVKRTWYKKFVGVVLCNSLRYKIYLSDNLKDTFYSIGDSWGRGEDHCQFVDSHLDGRTGPQSYVEALPTIQGYYRQYRQEPVSFGHIGFGTPYYYVGWYECGVSIPGKW

SEQ ID NO: 83 - protein, 1894 aa, Homo sapiens; identical to SEQ ID NO: 80

SEQ ID NO: 84 - protein, 1894 aa, Homo sapiens; identical to SEQ ID NO: 80

SEQ ID NO: 85 - protein, 1773 aa, artificial sequence; identical to SEQ ID NO: 78
  Synthetic

SEQ ID NO: 86 - protein, 333 aa, Pseudomonas sp. 24
MNKKLVLTVAALSAVTAAMMLKPWHTAEAPKQIPAAASIPAAATMAAPMQTPVLKAKSLPGAALVEGVDVIGSVALYSDGSLEYTLALRHLFDHFLGLAGSAEHIPAARNALVRHLQTQTLDPSAERDVLDAFERYMDYLRAAEQVELSSYEAGDLERTFDLLFGLRRSLLGNRLADAFFSDDEAREQVIIAQRRIATDPYMSAAEREQRYEELEQSLPPELQEARRQATVVARLSQDTSALRAAGATEDVIQQMRTQQVGYQAAERLAELDRSRAEWSQRVAAYEHERDALVATVGTQTAEQEMAVQQLRERLFTEHEARRVAALEKVLSSR

SEQ ID NO: 87 - protein, 204 aa, Mus sp.
MKVLAMRCRGIVPLLLLVLHWKHGAGSPLPITPVNATCAIRHPCHGNLMNQIKNQLAQLNGSANALFISYTAQGEPFPNVEKLCAPNMTDFPSFHGNGTEKTKLVELYRMVAYLSASLTNITRDQKVLNPTAVSLQVKLNATIDVMRGLLSNVLCRLCNKYRVGHVDVPPVPDHSDKEAFQRKKLGCQLLGTYKQVISVVVQAF

SEQ ID NO: 88 - protein, 85 aa, Bubalus bubalis
NITRDQKVLNPYAHGLHSKLNTTADVLRGLLSNVLCRLCSKYHVSHVDVTYGPDTSGKDVFQKKKLGCQLLGKYKQVIAVLAQAF

SEQ ID NO: 89 - protein, 202 aa, artificial sequence
  Synthetic
MKILAAGVVPLLLVLHWKPGAGSPLPINPVNATCNTHHPCPSNLMSQIRSQLAQLNGTANALFILYYTAQGEPFPNNLDKLCGPNVTDFPPFQPNGTEKVRLVELYRIVAYLGTALGNITRDQKTLNPTAHSLHSKLNATADTLRGLLSNVLCRLCSKYHVAHVDVAYGPDTSGKDVFQKKKLGCQLLGKYKQVMAVLAQAF

SEQ ID NO: 90 - protein, 17 aa, Bos taurus
  misc_feature (1)..(1): Xaa can be any naturally occurring amino acid
  misc_feature (12)..(12): Xaa can be any naturally occurring amino acid
  misc_feature (16)..(16): Xaa can be any naturally occurring amino acid
XPLPITPVVATXATRXP

SEQ ID NO: 91-99 - skipped (9 entries)

SEQ ID NO: 100 - protein, 202 aa, Homo sapiens
MKVLAAGVVPLLLVLHWKHGAGSPLPITPVNATCAIRHPCHNNLMNQIRSQLAQLNGSANALFILYYTAQGEPFPNNLDKLCGPNVTDFPPFHANGTEKAKLVELYRIVVYLGTSLGNITRDQKILNPSALSLHSKLNATADILRGLLSNVLCRLCSKYHVGHVDVTYGPDTSGKDVFQKKKLGCQLLGKYKQIIAVLAQAF

SEQ ID NO: 101 - protein, 203 aa, Mus musculus [sequence omitted]

SEQ ID NO: 102 - protein, 202 aa, Rattus norvegicus
MKVLATGIVPLLLILHWKHGAGSPLPITPVNATCAIRHPCHGNLMNQIKSQLAQLNGSANALFISYYTAQGEPFPNNVDKLCAPNMTDFPPFHANGTEKTKLVELYRMVAYLGASLTNITWDQKNLNPTAVSLQIKLNATTDVMRGLLSNVLCRLCNKYHVGHVDVPCVPDNSSKEAFQRKKLGCQLLGTYKQVISAVVQAF

SEQ ID NO: 103 - protein, 158 aa, Mus musculus
MNQIKNQLAQLNGSANALFISYYTAQGEPFPNNVEKLCAPNMTDFPSFHGNGTEKTKLVELYRMVAYLSASLTNITRDQKVLNPTAVSLQVKLNATIDVMRGLLSNVLCRLCNKYRVGHVDVPPVPDHSDKEAFQRKKLGCQLLGTYKQVISVVVQAF

SEQ ID NO: 104 - protein, 203 aa, Mus musculus [sequence omitted]

SEQ ID NO: 105 - protein, 1092 aa, Mus musculus
MAAYSWWRQPSWMVDNKRSRMTPNLPWLLSALTLLHLTMHANGLKRGVQDLKCTTNNMRVWDCTWPAPLGVSPGTVKDICIKDRFHSCHPLETTNVKIPALSPGDHEVTINYLNGFQSKFTLNEKDVSLIPETPEILDLSADFFTSSLLLKWNDRGSALPHPSNATWEIKVLQNPRTEPVALVLLNTMLSGKDTVQHWNWTSDLPLQCATHSVSIRWHIDSPHFSGYKEWSDWSPLKNISWIRNTETNVFPQDKVVLAGSNMTICCMSPTKVLSGQIGNTLRPLIHLYGQTVAIHILNIPVSENSGTNIIFITDDDVYGTVVFAGYPPDVPQKLSCETHDLKEIICSWNPGRITGLVGPRNTEYTLFESISGKSAVFHRIEGLTNETYRLGVQMHPGQEIHNFTLTGRNPLGQAQSAVVINVTERVAPHDPTSLKVKDINSTVVTFSWYLPGNFTKINLLCQIEICKANSKKEVRNATIRGAEDSTYHVAVDKLNPYTAYTFRVRCSSKTFWKWSRWSDEKRHLTTEATPSKGPDTWREWSSDGKNLIVYWKPLPINEANGKILSYNVSCSLNEETQSVLEIFDPQHRAEIQLSKNDYIISVVARNSAGSSPPSKIASMEIPNDDITVEQAVGLGNRIFLTWRHDPNMTCDYVIKWCNSSRSEPCLLDWRKVPSNSTETVIESDQFQPGVRYNFYLYGCTNQGYQLLRSIIGYVEELAPIVAPNFTVEDTSADSILVKWDDIPVEELRGFLRGYLFYFQKGERDTPKTRSLEPHHSDIKLKNITDISQKTLRIADLQGKTSYHLVLRAYTHGGLGPEKSMFVVTKENSVGLIIAILIPVAVAVIVGVVTSILCYRKREWIKETFYPDIPNPENCKALQFQKSVCEGSNALKTLEMNPCTPNNVEVLESRSIVPKIEDTEIISPVAERPGERSEVDPENHVVVSYCPPIIEEEITNPAADEVGGASQVVYIDVQSMYQPQAKAEEEQDVDPVVVAGYKPQMRLPISPAVEDTAAEDEEGKTAGYRPQANVNTWNLVSPDSPRSTDSNNEVVSFGSPCSINSRQFLIPPKDEDSPKSNGGGWSFTNFFQNKPND

SEQ ID NO: 106 - protein, 719 aa, Mus musculus
MAAYSWWRQPSWMVDNKRSRMTPNLPWLLSALTLLHLTMHANGLKRGVQDLKCTTNNMRVWDCTWPAPLGVSPGTVKDICIKDRFHSCHPLETTNVKIPALSPGDHEVTINYLNGFQSKFTLNEKDVSLIPETPEILDLSADFFTSSLLLKWNDRGSALPHPSNATWEIKVLQNPRTEPVALVLLNTMLSGKDTVQHWNWTSDLPLQCATHSVSIRWHIDSPHFSGYKEWSDWSPLKNISWIRNTETNVFPQDKVVLAGSNMTICCMSPTKVLSGQIGNTLRPLIHLYGQTVAIHILNIPVSENSGTNIIFITDDDVYGTVVFAGYPPDVPQKLSCETHDLKEIICSWNPGRITGLVGPRNTEYTLFESISGKSAVFHRIEGLTNETYRLGVQMHPGQEIHNFTLTGRNPLGQAQSAVVINVTERVAPHDPTSLKVKDINSTVVTFSWYLPGNFTKINLLCQIEICKANSKKEVRNATIRGAEDSTYHVAVDKLNPYTAYTFRVRCSSKTFWKWSRWSDEKRHLTTEATPSKGPDTWREWSSDGKNLIVYWKPLPINEANGKILSYNVSCSLNEETQSVLEIFDPQHRAEIQLSKNDYIISVVARNSAGSSPPSKIASMEIPNDDITVEQAVGLGNRIFLTWRHDPNMTCDYVIKWCNSSRSEPCLLDWRKVPSNSTETVIESDQFQPGVRYNFYLYGCTNQGYQLLRSIIGYVEELEA

SEQ ID NO: 107 - protein, 202 aa, Homo sapiens; identical to SEQ ID NO: 100

SEQ ID NO: 108 - protein, 202 aa, Sus scrofa
MKVLAAGVVPLLLVLHWKHGAGSPLSITPVNATCATRHPCHSNLMNQIKNQLAQLNSSANALFILYYTAQGEPFPNNLDKLCGPNVTNFPPFHANGTEKARLVELYRIIAYLGASLGNITRDQRSLNPGAVNLHSKLNATADSMRGLLSNVLCRLCNKYHVAHVDVAYGPDTSGKDVFQKKKLGCQLLGKYKQVISVLARAF

SEQ ID NO: 109 - protein, 202 aa, Bos taurus
MKVLAAGVVPLLLVLHWKHGAGSPLPITPVNATCATRHPCPSNLMNQIRNQLGQLNSSANSLFILYYTAQGEPFPNNLDKLCSPNVTDFPPFHANATEKARLVELYRIIAYLGASLGNITRDQKVLNPYAHGLHSKLSTTADVLRGLLSNVLCRLCSKYHVSHVDVTYGPDTSGKDVFQKKKLGCQLLGKYKQVIAVLAQAF

SEQ ID NO: 110 - protein, 181 aa, Trichosurus vulpecula
GSPLPITPDDPKCEMRHQCPGNLTFQIRNQLNQLNSSAPEFFTYYYKAQGNPFQTNLDKLCNPNVTDFPPFHANGTGKEKLVELYRIIAYLNASPGNITRDQKALNPSALPLLSRLNMTTAIMRGLLNNLTCRLCRKYHVAHVSVSYGPDTANKDTFQKKKLGGHLLGKYKQVISLVAQAF

SEQ ID NO: 111 - protein, 202 aa, Neovison vison
MKVLAAGVVPLLLVLHWKHGAGTPLPITPVNATCATRHPCHSNLMNQIRNQLAHVNGSANALFILYYTAQGEPFPNNLDKLCGPNVTDFPPFHRNGTEKTRLVELYRIIAYLGASLGNITRDQKVLNPNALSLHSKLKATADILRGLLSNVLCRLCNKYHVAHVDVAYGPDTSGKDVFQKKKLGCQLLGKYKQVIAVVAQAF

SEQ ID NO: 112 - protein, 136 aa, Ondatra zibethicus
YTAQGEPFPNNLDKLCGPNMTDFPPFHANGTEKTKLVELYRMVAYLSVFLGNITREQRILNPNALSLHSKLNATIDIMRGLLSNVLCRLCNKYHVGHVDVTYAPDTSSKDVFQKKKLGCQLLGTYKQVISVVAQAF

SEQ ID NO: 113 - protein, 202 aa, Bos taurus
MKVLAAGVVPLLLVLHWKHGAGSPLPITPVNATCATRHPCPSNLMNQIRNQLGQLNSSANSLFILYYTAQGEPFPNNLDKLCSPNVTDFPPFHANGTEKARLVELYRIIAYLGASLGNITRDQKVLNPYAHGLHSKLSTTADVLRGLLSNVLCRLCSKYHVSHVDVTYGPDTSGKDVFQKKKLGCQLLGKYKQVIAVLAQAF

SEQ ID NO: 114 - protein, 202 aa, Sus scrofa; identical to SEQ ID NO: 108

SEQ ID NO: 115 - protein, 202 aa, Microtus arvalis
MKVLAAGIVPLLLVLHWKHGAGSPLPITPVNATCATRHPCHGNLMNQIKNQLAQLNGSANALFISYYTAQGEPFPNNLDKLCGPNMTDFPPFHANGTEKTKLVELYRMVAYLSVFLSNVTRDQRVLNPNAQSLHSKLNATIDIMRGLLSNVLCRLCNKYHVGHVDVTYAPDTTSKDAFQKKKLGCQLLGTYKQVISMVAQAF

SEQ ID NO: 116 - protein, 203 aa, Mus musculus [sequence omitted]

SEQ ID NO: 117 - skipped

SEQ ID NO: 118 - protein, 202 aa, Homo sapiens; identical to SEQ ID NO: 100

SEQ ID NO: 119 - protein, 203 aa, artificial sequence [sequence omitted]

SEQ ID NO: 120 - protein, 202 aa, Homo sapiens; identical to SEQ ID NO: 100

SEQ ID NO: 121 - protein, 202 aa, Homo sapiens; identical to SEQ ID NO: 100

SEQ ID NO: 122 - protein, 202 aa, Homo sapiens; identical to SEQ ID NO: 100

SEQ ID NO: 123 - protein, 26 aa, Mus musculus
AFQRKKLGCQLLGTYKQVISVVVQAF

SEQ ID NO: 124 - protein, 202 aa, artificial sequence; identical to SEQ ID NO: 100
  Synthetic

SEQ ID NO: 125 - protein, 202 aa, Homo sapiens; identical to SEQ ID NO: 100

SEQ ID NO: 126 - protein, 203 aa, Mus musculus [sequence omitted]

SEQ ID NO: 127 - protein, 202 aa, Rattus norvegicus; identical to SEQ ID NO: 102

SEQ ID NO: 128 - protein, 203 aa, Mus musculus [sequence omitted]

SEQ ID NO: 129 - protein, 202 aa, Sus scrofa; identical to SEQ ID NO: 108

SEQ ID NO: 130 - protein, 173 aa, Homo sapiens; identical to SEQ ID NO: 21

SEQ ID NO: 131 - protein, 164 aa, Mus musculu
MLFLGQKALLLVLAISIPSDWLPLGVSGQRGDDVPETFTDDPNLVNDPSTDDTALADITPSTDDLAGDKNATAECRDEKFACTRLYSVHRPVRQCVHQSCFTSLRRMYIINNEICSRLVCKEHEAMKDELCRQMAGLPPRRLRRSNYFRLPPCENMNLQRPDGL

SEQ ID NO: 132 - protein, 173 aa, Homo sapiens; identical to SEQ ID NO: 21

SEQ ID NO: 133 - protein, 173 aa, Homo sapiens; identical to SEQ ID NO: 21

SEQ ID NO: 134 - protein, 173 aa, Homo sapiens; identical to SEQ ID NO: 21

SEQ ID NO: 135 - protein, 164 aa, Mus musculus; identical to SEQ ID NO: 131

SEQ ID NO: 136 - protein, 173 aa, Homo sapiens; identical to SEQ ID NO: 21

SEQ ID NO: 137 - protein, 170 aa, Bos taurus
MTFFGPKVLLLLTALIMSSGRTPLGVSGQRGDDVTTVTSETFTEDPNLVNDPATDETVLADIQPSTDDLASLNDKNTTTECRDEKFACTRLYSVHRPIKQCLHQICFTSSRRMYVINNEICSRLVCKEHEAMKDELCRQKAGLPPRRLRRSNYFRLPPCDNVNLQGPSGL

SEQ ID NO: 138 - protein, 164 aa, Mus musculus
MLFLGQKALLLVLAVSIPSDWLPLGVSGQRGDDVPETFTDDPNLVNDPSTDDTALADITPSTDDLADDKNATAECRDEKFACTRLYSVHRPVRQCVHQSCFTSLRRMYIINNEICSRLVCKEHEAMKDELCRQMAGLPPRRLRRSNYFRLPPCENMNLQRPDGL

SEQ ID NO: 139 - protein, 173 aa, artificial sequence; identical to SEQ ID NO: 21
  Synthetic

SEQ ID NO: 140 - protein, 170 aa, Bos taurus
MAFFGPKVLLLLTALIMSSGRTPLGVSGQRGDDVTTVTSETFTEDPNLVNDPATDETVLADIQPSTDDLASLNDKNTTTECRDEKFACTRLYSVHRPIKQCLHQICFTSSRRMYVINNEICSRLVCKEHEAMKDELCRQKAGLPPRRLRRSNYFRLPPCDNVNLQGPSGL

SEQ ID NO: 141 - protein, 166 aa, Rattus norvegicus
MLVFGQKALLLVVALSIPSDWLPLGVSGQRGDDVPETFTDDPNLVNDPSTDDTVLADITPSTDDLASAGDKNTTAECRDEKFACTRLYSVHRPVRQCVHQACFTSLRRMYIINNEICSRLVCKEHEAMKDELCRQMAGLPPRRLRRSNYFRLPPCENMNLQRPDGP

SEQ ID NO: 142 - protein, 75 aa, Mus musculus
MLFLGQKALLLVLAISIPSDWLPLGVSGQRGDDVPETFTDDPNLVNDPSTDDTALADITPSTDDLGEFRSGRVPG

SEQ ID NO: 143 - protein, 110 aa, Mus musculus
DMLFLGQKALLLVLAISIPSDDVPETFTDDPNLVNDPSTDDTALADITPSTDDLAGDKNATAECRDEKFACTRLYSVHRPVRQCVHQSCFTSLRRMYIINNEICSRLVCK

SEQ ID NO: 144 - protein, 164 aa, Mus musculus; identical to SEQ ID NO: 131

SEQ ID NO: 145 - protein, 424 aa, Mus musculus
MPLLWLRGFLLASCWIIVRSSPTPGSEGHGSAPDCPSCALATLPKDGPNSQPEMVEAVKKHILNMLHLKKRPDVTQPVPKAALLNAIRKLHVGKVGENGYVEIEDDIGRRAEMNELMEQTSEIITFAESGTARKTLHFEISKEGSDLSVVERAEVWLFLKVPKANRTRTKVTIRLFQQQKHPQGSLDTGDEAEEMGLKGERSELLLSEKVVDARKSTWHIFPVSSSIQRLLDQGKSSLDVRIACEQCQESGASLVLLGKKKKKEVDGDGKKKDGSDGGLEEEKEQSHRPFLMLQARQSEDHPHRRRRRGLECDGKVNICCKKQFFVSFKDIGWNDWIIAPSGYHANYCEGECPSHIAGTSGSSLSFHSTVINHYRMRGHSPFANLKPCCVPTKLRPMSMLYYDDGQNIIKKDIQNMIVEECGCS

SEQ ID NO: 146 - protein, 426 aa, Homo sapiens
MPLLWLRGFLLASCWIIVRSSPTPGSEGHSAAPDCPSCALAALPKDVPNSQPEMVEAVKKHILNMLHLKKRPDVTQPVPKAALLNAIRKLHVGKVGENGYVEIEDDIGRRAEMNELMEQTSEIITFAESGTARKTLHFEISKEGSDLSVVERAEVWLFLKVPKANRTRTKVTIRLFQQQKHPQGSLDTGEEAEEVGLKGERSELLLSEKVVDARKSTWHVFPVSSSIQRLLDQGKSSLDVRIACEQCQESGASLVLLGKKKKKEEEGEGKKKGGGEGGAGADEEKEQSHRPFLMLQARQSEDHPHRRRRRGLECDGKVNICCKKQFFVSFKDIGWNDWIIAPSGYHANYCEGECPSHIAGTSGSSLSFHSTVINHYRMRGHSPFANLKSCCVPTKLRPMSMLYYDDGQNIIKKDIQNMIVEECGCS

SEQ ID NO: 147 - protein, 424 aa, Rattus norvegicus
MPLLWLRGFLLASCWIIVRSSPTPGSEGHGAAPDCPSCALATLPKDGPNSQPEMVEAVKKHILNMLHLKKRPDVTQPVPKAALLNAIRKLHVGKVGENGYVEIEDDIGRRAEMNELMEQTSEIITFAESGTARKTLHFEISKEGSDLSVVERAEVWLFLKVPKANRTRTKVTIRLFQQQKHPQGSLDMGDEAEEMGLKGERSELLLSEKVVDARKSTWHIFPVSSSIQRLLDQGKSSLDVRIACEQCQESGASLVLLGKKKKKEVDGDGKKKDGSDGGLEEEKEQSHRPFLMLQARQSEDHPHRRRRRGLECDGKVNICCKKQFFVSFKDIGWNDWIIAPSGYHANYCEGECPSHIAGTSGSSLSFHSTVINHYRMRGHSPFANLKSCCVPTKLRPMSMLYYDDGQNIIKKDIQNMIVEECGCS

SEQ ID NO: 148 - protein, 426 aa, Equus caballus
MPLLWLRGFLLASCWIIVKSSPTPGSEGHSAAPNCPSCALATLPKDVPNAQPEMVEAVKKHILNMLHLKKRPDVTQPVPKAALLNAIRKLHVGKVGENGYVEIEDDIGRRAEMNELMEQTSEIITFAESGTARKTLHFEISKEGSDLSVVERAEVWLFLKVPKANRTRSKVTIRLLQQQKHPQGSSDTREEAEEADLMEERSEQLISEKVVDARKSTWHIFPVSSSIQRLLDQGKSSLDIRIACDQCHETGASLVLLGKKKKKEEEGEGKKKDGGEAGAGVDEEKEQSHRPFLMLQARQSEDHPHRRRRRGLECDGKVNICCKKQFFVSFKDIGWNDWIIAPSGYHANYCEGECPSHIAGTSGSSLSFHSTVINQYRLRGHNPFANLKSCCVPTKLRPMSMLYYDDGQNIIKKDIQNMIVEECGCS

SEQ ID NO: 149 - protein, 424 aa, Felis catus
MPLLWLRGFLLASCWIIVRSSPTPGSEGPGAAPDCPSCALATLPKDVPNSQPEMVEAVKKHILNMLHLKKRPEVTQPVPKAALLNAIRKLHVGKVGENGYVEIEDDIGRRAEMNELMEQTSEIITFAESGTARKTLHFEISKEGSDLSVVERAEVWLFLKVPKANRTRTKVTIQLLQKQPQGGVDAGEEAEEMGLMEERNEVLISEKVVDARKSTWHIFPVSSSIQRLLDQGKSSLDVRIACEQCHETGASLVLLGKKKKKEEEGEGKKKDGGDGGAGADEDKEQSHRPFLMLQARQSEDHPHRRRRRGLECDGKVNICCKKQFFVSFKDIGWNDWIIAPSGYHANYCEGECPSHIAGTSGSSLSFHSTVINHYRMRGHSPFANLKSCCVPTKLRPMSMLYYDDGQNIIKKDIQNMIVEECGCS

SEQ ID NO: 150 - protein, 424 aa, Gallus gallus
MPLLWKRGFLLVICWIIVRSSPTPGSEGHSSVADCPSCALTTLSKDVPSSQPEMVEAVKKHILNMLHLRDRPNITQPVPKAALLNATKKLHVGKVGDDGYVEIEDDVGRRAEMNEVVEQTSEIITFAESGTPKKTLHFEISKEGSELSVVEHAEVWLFLKVSKANRSRTKVTIRLFQQQRQPKGNSEAAEDMEDMGLKGERSETLISEKAVDARKSTWHIFPISSSVQRLLDQGQSSLDVRIACDLCQETGASLVLLGKKKKKEDDGEGKEKDGGELTGEEEKEQSHRPFLMMLARHSEDRQHRRRERGLECDGKVNICCKKQFFVSFKDIGWSDWIIAPTGYHANYCEEECPSHIAGTSGSSLSFHSTVINHYRMRGHSPFANLKSCCVPTKLRPMSMLYYDDGQNIIKKDIQNMIVEECGCS

SEQ ID NO: 151 - protein, 158 aa, Homo sapiens
MMQKLLKCSRLVLALALILVLESSVQGYPTRRARYQWVRCNPDSNSANCLEEKGPMFELLPGESNKIPRLRTDLFPKTRIQDLNRIFPLSEDYSGSGFGSGSGSGSGSGSGFLTEMEQDYQLVDESDAFHDNLRSLDRNLPSDSQDLGQHGLEEDFML

SEQ ID NO: 152 - protein, 179 aa, Rattus norvegicus
MRQVPVGTRLVLALAFVLVWGSSVQGYPARRARYQWVRCKPDGIFANCIEEKGPRFDLIAEESNVGPPMTDPVLMRGFPNDFFPISDDYSGSGSGSGSGSGSGSGSGSGSGSGSGSGSGSGSGSGSGSGSGSGSGSGSLADMEWEYQPTDENNIVYFNYGPFDRMLTEQNQEQPGDFII

SEQ ID NO: 153 - protein, 152 aa, Mus musculus
MQVPVGSRLVLALAFVLVWGSSVQGYPARRARYQWVRCKPNGFFANCIEEKGPQFDLIDESNNIGPPMNNPVLMEGPSKDFISNYDDYGSGSGSGSGSGSGSGSGSGSGFLGDMEWEYQPTDESNIVYFNYKPFDRILTEQNQDQPEDDFII

SEQ ID NO: 154 - protein, 141 aa, Salmo salar
MKGLLNSKICLTLAVIFFLADSGHGAPAKGRYMWVKCNPDTNNANCATQRGPLMDLPGPPDRLPSIAVKDIVPEEAGSEPEEQSGEGSATGILFTEQGSGDQLGSTDLDGIDYPGSVSPPNINMDHALPPAQELKEDHLFL

SEQ ID NO: 155 - protein, 101 aa, Salmo salar
MKGLLNSKICLTLAVIFFLADNGHGAPAKGRYMWVKCNPDTNNANCATQRGPLMDLPGPPDRLPSIAVKDIVPEEAVFPPNINMDHALPPAQELKEDHLFL

SEQ ID NO: 156 - protein, 82 aa, Salmo salar
MKGLLNSKICLTLAVIFFLADNGHGAPAKGRYMWVKCNPDTKNANCVTQRGPLMDLPGPPDRLPSIAVKDIVPEEAGSEPEE

SEQ ID NO: 157 - protein, 150 aa, Bos taurus
MQVLLQCARLVLALAFILFSSSVQGSPVQRAGYQCNPDSPDSNSANCIEEKGTAFDILRGESSRIPPPRTDISPLMNSKNLNEVFPLSEDISGSGSGAESGSGFLNEIEQEYQPVEENDAFYYTFRSRKRNVPSYNQDLGQDGPEEDFTI

SEQ ID NO: 158 - protein, 179 aa, Rattus norvegicus; identical to SEQ ID NO: 152

SEQ ID NO: 159 - protein, 158 aa, Danio rerio
MRFYHMITLALAIICLSGHSGLGAPAASTKGNYMWVECKPDGKNANCLTKKGPLIPLDGQRTRLPPSAAKDIVAVSAEEATPDTEDLSGDGSGDSDNFPVLASKKQPWRRDAPEQDIFKNEEEGSTTFSGDIDYSEYVSTQKVNWLSEEDLKEENIIA

SEQ ID NO: 160 - protein, 152 aa, Mus musculus; identical to SEQ ID NO: 153

SEQ ID NO: 161 - protein, 158 aa, artificial sequence
  Synthetic
MMQKLLKCSRLVLALALILVLESSVQGYPTQRARYQWVRCNPDSNSANCLEEKGPMFELLPGESNKIPRLRTDLFPKTRIQDLNRIFPLSEDYSGSGFGSGSGSGSGSGSGFLTEMEQDYQLVDESDAFHDNLRSLDRNLPSDSQDLGQHGLEEDFML

SEQ ID NO: 162 - protein, 131 aa, Esox lucius
MKGILSLKICLTLAVISILTDNGLGAPTKGRYMWVNCRPDSKNANCQTQRGPLVELPGPPDRLPSTAVKDIVQKETVSELEEQSGEGSATGPFLADQGSGDVYGVDYAEFTMPVDQALPHAQELKEDHLIM

SEQ ID NO: 163 - protein, 131 aa, Esox lucius
MKGILSLKICLTLAVISTLTDNGLGAPTKGRYMWVNCRPDSKNANCQTQRGPLVELPGPPDRLPSTAVKDIVQKETVSELEEQSGEGSATGPFLADQGSGDVYGVDYAEFAMPVDQALPHAQELKEDHLIM

SEQ ID NO: 164 - protein, 141 aa, Salmo salar
MKGLLNSKICLTLAVIFFLADNGHGAPAKGRYMWVKCNPDTNNANCATQRGPLMDLPGPPDRLPSIAVKDIVPEEAGSEPEEQSGEGSATGILFTEQGSGDQLGSTDLDGIDYPGSVFPPNINMDHALPPAQELKEDHLFL

SEQ ID NO: 165 - protein, 141 aa, Salmo salar
MKGLLNSKICLTLAVIFFLADNGHGAPAKGRYMWVKCNPDTKNANCVTQRGPLMDLPGPPDRLPSIAVKDIVPEEAGSEPEEQSGEGSATGILFTEQGSGDQLGSTDLDGIDYPGSVFPPNINMDHALPPAQELKEDHLFL

SEQ ID NO: 166 - protein, 141 aa, Salmo salar
MKGLLNSKICLTLAVIFFLADNGHGAPAKGRYMWVKCNPDTKNANCATQRGPLMDLPGPPDRLPSIAVKDIVPEEAGSEPEEQSGEGSATGILFTEQGSGDQLGSTDLDGIDYPGSVFPPNINMDHALPPAQELKEDHLFL

SEQ ID NO: 167 - protein, 154 aa, Salmo salar
MKGLLNSKICLTLAVIFFLADNGHGAPAKGRYMWVKCNPDTNNANCATQRGPLMDLPGPPDRLPSIAVKDIVPEEAGSEPEEQSGEGSATGILFTEQGSGDQLGSTDLDGIDYPGSVFPPNINMDHALHLVKVVVPCYLTQVLMLGCVILRLGN

SEQ ID NO: 168 - protein, 158 aa, Homo sapiens; identical to SEQ ID NO: 151

SEQ ID NO: 169 - protein, 82 aa, Salmo salar; identical to SEQ ID NO: 156

SEQ ID NO: 170 - protein, 150 aa, Bos taurus; identical to SEQ ID NO: 157

SEQ ID NO: 171 - protein, 158 aa, Homo sapiens; identical to SEQ ID NO: 161

SEQ ID NO: 172 - protein, 171 aa, Mus musculus
YEMQSSICRAAIHYGIIDNEGGWVDVTRQGRKHYFIKSNRNGIQTIGKYHSANSFTVSKVTVQAVTCETTVEQLCPFHKPASHCPRVYCPRNCMQSNPHYARVIGTRIYSDLSSICRAAVHAGVVRNHGGYVDVMPVDKRKMYTASFQNGIFSESLQNPTGGKAFRVFAVV

SEQ ID NO: 173 - protein, 500 aa, Rattus norvegicus
MMCKAQEWLRMTALLFVARAVPAMVVPNATLLEKLLEKYMDEDDEWWTAKQRGKRAITDNDMQSILDLHNKLRSQVYPAASNMEYMTWDVELERSAESWAETCLWEHGPTSLLPSIGQNLGAHWGRYRPPTFHVQAWYDEVRDFSYPYEHECDPYCPFRCSGPVCTHYTQVVWATSSRIGCAINLCHNMNIWGQIWPKAVYLVCNYSPKGNWWGHAPYKHGKPCSACPPSFGGGCRENLCYKEGSDQYYTPQEEETNEIERQESQVHDTHVRTRSDDSNRNDVISTQQMSQIVSCEVRLRDQCKGTTCNRYECPAGCLDSKAKVIGSVHYEMQSSICRAAIHYGIIDNEGGWVDVTRQGRKHYFIKSNRNGIQTIGKYRSANSFIVSKVTVQAVTCETTVEQLCPFHKPASHCPRVYCPRNCMQANPHYARVIGSRIYSDLSSICRAAVHAGVIRNHGGYVDVMPVDKRRMYTASFQNGIFSESLQNPTGGKAFRVFAVV

SEQ ID NO: 174 - protein, 500 aa, Bos taurus
MKCTVREWFRVTTVLLMAPAIPAMVVPNATLLEKLLEKYMDEDGVWWIAKQRGKRAITDNDMQSILDLHNKLRSQVYPTASNMEYMTWDVELERSAESWAETCLWEHGPANLLPSIGQNLGAHWGRYRPPTFHVQAWYDEVRDFSYPYEHECNPYCPFRCSGPVCTHYTQVVWATSSRIGCAINLCHNMNIWGQIWPKAVYLVCNYSPKGNWWGHAPYKHGRPCSACPPSFGGGCRENLCYKEGSDSYYPAQEEETNEIERQQSQVHDTHVRTVADDSNRNEVISTQQMSQIVSCEVRLRDQCKGTTCNRYECPAGCLDSKAKVIGSVHYEMQSSICRAAIHYGIIDNDGGWVDITRQGRKHYFIKSNRNGVQTIGKYQSANSFTVSKVTVQAVTCETTVEQLCPFHKPASHCPRVYCPRNCMQANPHYARVIGTRIYSDLSSICRAAVHAGVVQNQGGYVDVMPVDKRKTYTASFQNGIFSESLQNPPGGKAFRVFAVM

SEQ ID NO: 175 - protein, 500 aa, Rattus norvegicus; identical to SEQ ID NO: 173

SEQ ID NO: 176 - protein, 523 aa, Gallus gallus
MKYVVQEWLRITTLLFIAQAVSAMVLPNATLLEELLEKYMDEDGEWWIANVSRKRAITDSDMQSILDLHNKLRGQVYPPASNMEYMTWDTELERSAESWAETCLWEHGPASLLPSIGQNLGAHWGRYRPPTFHVQAWYDEVRDFTYPHPHECNPYCPYKCSGPVCTHYTQVVWATSSRIGCAINLCHNMNIWGQIWPKAVYLVCNYSPKGNWWGHAPYKPGRPCSACPPSFGGGCRENLCYREGSERPYSPHEPEEETNEIERQRSKAQDATAQSRPRTHSPSGSTGSEDSEKNEVISTQQMSQIVSCEVRLRDQCKGTTCNRYECPAGCLDSKAKVIGSVHYEMQSSICKAAIHYGILDNEGGWVDVTRQGRKNYFIKSYRNGIQSIGKYQSANSFTVSKVTVQAITCETTVEQLCPFQKPASHCPRVYCPHNCMQANPHYARVIGTRIYSDISSICRAAVHAGVVRNEGGYVDVMPVDKRKVYIASFLNGIFSESLQNPPGKQGIQSICCRLNQVDYKTGK

SEQ ID NO: 177 - protein, 500 aa, Homo sapiens
MKCTAREWLRVTTVLFMARAIPAMVVPNATLLEKLLEKYMDEDGEWWIAKQRGKRAITDNDMQSILDLHNKLRSQVYPTASNMEYMTWDVELERSAESWAESCLWEHGPASLLPSIGQNLGAHWGRYRPPTFHVQSWYDEVKDFSYPYEHECNPYCPFRCSGPVCTHYTQVVWATSNRIGCAINLCHNMNIWGQIWPKAVYLVCNYSPKGNWWGHAPYKHGRPCSACPPSFGGGCRENLCYKEGSDRYYPPREEETNEIERQQSQVHDTHVRTRSDDSSRNEVISAQQMSQIVSCEVRLRDQCKGTTCNRYECPAGCLDSKAKVIGSVHYEMQSSICRAAIHYGIIDNDGGWVDITRQGRKHYFIKSNRNGIQTIGKYQSANSFTVSKVTVQAVTCETTVEQLCPFHKPASHCPRVYCPRNCMQANPHYARVIGTRVYSDLSSICRAAVHAGVVRNHGGYVDVMPVDKRKTYIASFQNGIFSESLQNPPGGKAFRVFAVV

SEQ ID NO: 178 - protein, 500 aa, Mus musculus
MMCKAQEWLRVTALLFVARAVPAMVVPNATLLEKLLEKYMDEDGEWWTAKQRGKRAITDNDMQSILDLHNKLRSQVYPTASNMEYMTWDVELERSAESWAEMCLWEHGPASLLPSIGQNLGAHWGRYRPPTFHVQAWYDEVRDFSYPYENECDPYCPFRCSGPVCTHYTQVVWATSSRIGCAVNLCHNMNIWGQIWPKAVYLVCNYSPKGNWWGHAPYKHGRPCSACPPSFGGGCRENLCYKEGSDRYYTPREEETNEIERQQSQVHDTHVRTRSDDSDRNDVISTQQMSQIVSCEVRLRDQCKGTTCNRYECPAGCLDSKAKVIGSVHYEMQSSICRAAIHYGIIDNEGGWVDVTRQGRKHYFIKSNRNGIQTIGKYHSANSFTVSKVTVQAVTCETTVEQLCPFHKPASHCPRVYCPRNCMQSNPHYARVIGTRIYSDLSSICRAAVHAGVVRNHGGYVDVMPVDKRKMYTASFQNGIFSESLQNPTGGKAFRVFAVV

SEQ ID NO: 179 - protein, 403 aa, Danio rerio
MKCGHLEDLFSGFVLLVTVQTVVSMVIPNATHLEAILEKYMDKDETWWQSKSRGKRAISQSDMQLILDLHNKLRGQVYPPASNMEYMVWDTELERSAEHWAHTCLWEHGPSHLLTRIGQNLGAHWGRDRPPTFHVQAWYDEVRDFSYPYPQECNPHCPYRCSGPVCTHYTQLVWATSNKIGCAINVCYNMNVWGMIWAKAVYLVCNYSPPGNWWGHAPYKHGTPCSACPPSYGGGCRNNLCYKDDGSNYHYTPETEENNYIEPEPEPVRSHDAHYRDETTTPSPNENIERNEVSSTSQMSQQVACDTRLRDQCKGTTCNRYECPPGCFYNYGKVIGSGHYADNSSICRAAIHAGVIQSDSGGYVDVMPVDKRKQHKGSYQNGISSESLQNPPGGKAFRVFAVI

SEQ ID NO: 180 - protein, 500 aa, Mus musculus; identical to SEQ ID NO: 178

SEQ ID NO: 181 - protein, 403 aa, Danio rerio; identical to SEQ ID NO: 179

SEQ ID NO: 182 - protein, 500 aa, Homo sapiens; identical to SEQ ID NO: 177

SEQ ID NO: 183 - protein, 500 aa, Homo sapiens; identical to SEQ ID NO: 177

SEQ ID NO: 184 - protein, 500 aa, Bos taurus; identical to SEQ ID NO: 174

SEQ ID NO: 185 - protein, 500 aa, Mus musculus; identical to SEQ ID NO: 178

SEQ ID NO: 186 - protein, 525 aa, Homo sapiens [sequence omitted]

SEQ ID NO: 187 - protein, 203 aa, Mus musculus
MECCRRAAPGTPLLVLAFLLLSSRTARSEEDREGLWDAWGPWSECSRTCGGGASYSLRRCLSSKSCEGRNIRYRTCSNVDCPPEAGDFRAQQCSAHNDVKYHGQLYEWLPVSNDPDNPCSLKCQAKGTSLVVELAPKVLDGTRCYTESLDMCISGLCQIVGCDHQLGSTVKEDNCGVCNGDGSTCRLVRGQYKSQLSASKCKT

SEQ ID NO: 188 - protein, 203 aa, Mus musculus; identical to SEQ ID NO: 187

SEQ ID NO: 189 - protein, 640 aa, Mus musculus
MAVPAHKHVSGFSSSLRSSSGEAGGGSRRPHRKPAILRKISAAQQLSASEVVTHLGQTVALASGTLSVLLHCEAVGNPRPTIHWTRNGEAVQFSDRILLQPDDSLQILAPVEADVGFYTCNATNALGYDSVSIAVTLAGKPLVKTSRMTVLNTEKPTVTVDIGGTVRTVRGVNVTINCQVAGVPEAEVTWFRNKSKLGSSHHLHEGSSHHLHEGSLLLTDVSFSDQGLYSCRAANLHGEQTESTQLLILDPPQVPTQLEDIRALLLATGPNLPSVLMSPLGTQLVLDPGNSALLGCPIKGHPTPNITWFQNGQPIATAPGLTHHIWGAGQILRVANLSGGPQGEFSCLAQNEAGTLLQKASLVIQDYWWSVDRLATCSASCGNRGIHQPRLRCLLNTTEVDPEHCTGKPRPAVQPVACNRRDCPSRWMVTSWSACTRSCGGGVQTRRVTCQKLKASGISTPVSNDMCSQLAKRPVDTQACNQQLCVEWAFSSWGQCNGPCIGPRLAVQHRQVFCQTRDGITLPSEQCSALPRPVSTQNCWSEACSVHWRVSLWTLCTATCGNYGFQSRRVECVHVRTNKAVPEHLCSWGPRPANWQRCNVTPCENTECRDTTRYCEKVRQLKLCQLGQFRSRCCGTCGKA

SEQ ID NO: 190 - protein, 640 aa, Mus musculus; identical to SEQ ID NO: 189

SEQ ID NO: 191 - protein, 203 aa, Mus musculus; identical to SEQ ID NO: 187

SEQ ID NO: 192 - protein, 467 aa, Homo sapiens
MCLTDEWGFLFFFFFLGVPEAEVTWFRNKSKLGSPHHLHEGSLLLTNVSSSDQGLYSCRAANLHGELTESTQLLILDPPQVPTQLEDIRALLAATGPNLPSVLTSPLGTQLVLDPGNSALLGCPIKGHPVPNITWFHGGQPIVTATGLTHHILAAGQILQVANLSGGSQGEFSCLAQNEAGVLMQKASLVIQDYWWSVDRLATCSASCGNRGVQQPRLRCLLNSTEVNPAHCAGKVRPAVQPIACNRRDCPSRWMVTSWSACTRSCGGGVQTRRVTCQKLKASGISTPVSNDMCTQVAKRPVDTQACNQQLCVEWAFSSWGQCNGPCIGPHLAVQHRQVFCQTRDGITLPSEQCSALPRPVSTQNCWSEACSVHWRVSLWTLCTATCGNYGFQSRRVECVHARTNKAVPEHLCSWGPRPANWQRCNITPCENMECRDTTRYCEKVKQLKLCQLSQFKSRCCGTCGKA

SEQ ID NO: 193 - protein, 284 aa, Homo sapiens
MQKASLVIQDYWWSVDRLATCSASCGNRGVQQPRLRCLLNSTEVNPAHCAGKVRPAVQPIACNRRDCPSRWMVTSWSACTRSCGGGVQTRRVTCQKLKASGISTPVSNDMCTQVAKRPVDTQACNQQLCVEWAFSSWGQCNGPCIGPHLAVQHRQVFCQTRDGITLPSEQCSALPRPVSTQNCWSEACSVHWRVSLWTLCTATCGNYGFQSRRVECVHARTNKAVPEHLCSWGPRPANWQRCNITPCENMECRDTTRYCEKVKQLKLCQLSQFKSRCCGTCGKA

SEQ ID NO: 194 - protein, 267 aa, Homo sapiens
MARFLTLCTWLLLLGPGLLATVRAECSQDCATCSYRLVRPADINFLACVMECEGKLPSLKIWETCKELLQLSKPELPQDGTSTLRENSKPEESHLLAKRYGGFMKRYGGFMKKMDELYSMEPEEEANGSEILAKRYGGFMKKDAEEDDSLANSSDLLKELLETGDNRERSHHQDGSDNEEEVSKRYGGFMRGLKRSPQLEDEAKELQKRYGGFMRRVGRPEWWMDYQKRYGGFLKRFAEALPSDEEGESYSKEVPEMEKRYGGFMRF

SEQ ID NO: 195 - protein, 267 aa, Homo sapiens [sequence omitted]

SEQ ID NO: 196 - protein, 261 aa, Danio rerio
GGTGQTAVTASVMKTLTVPISCRWTLLLSACLTLTARADCGEDCAYCLQQMPLQLKHLNSIECVLECEEQPNAGSSWSQCKHFMQNADNSPEGNRAATQIEHSNSQQHQVDKKYGGFMKRSESLIKRYGGFMKKAAEFYGLEPEDVDQGRAILTNHDVEMLANQVEADGEREEAALTRSKGGEEGTAKRYGGFMRRGGLYDLESGVRELQKRYGGFMRRVGRPDWWQESKRYGGFLKRSQEQDEDENSSEVEKRYGGFMGY

SEQ ID NO: 197 - protein, 189 aa, Homo sapiens
MARFLTLCTWLLLLGPGLLATVRAECSQDCATCSYRLVRPADINFLACVMECEGKLPSLKIWETCKELLQLSKPELPQDGTSTLRENSKPEESHLLAKRYGGFMKRYGGFMKKMDELYPMEPEEEANGSEILAKRYGGFMKKDAEEDDSLANSSDLLKELLETGDNRERSHHQDGSDNEEKKKKKKKKK

SEQ ID NO: 198 - protein, 268 aa, Mus musculus
MARFLRLCTWLLALGSCLLATVQAECSQDCAKCSYRLVRPGDINFLACTLECEGQLPSFKIWETCKDLLQVSRPEFPWDNIDMYKDSSKQDESHLLAKKYGGFMKRYGGFMKKMDELYPMEPEEEANGGEILAKRYGGFMKKDADEGDTLANSSDLLKELLGTGDNRAKDSHQQESTNNDEDMSKRYGGFMRSLKRSPQLEDEAKELQKRYGGFMRRVGRPEWWMDYQKRYGGFLKRFAESLPSDEEGENYSKEVPEIEKRYGGFMRF

SEQ ID NO: 199 - protein, 267 aa, Homo sapiens
MARFLTLCTWLLLLGPGLLATVRAECSQDCATCSYRLVRPADINFLACVMECEGKLPSLKIWETCKELLQLSKPELPQDGTSTLRENSKPEESHLLAKRYGGFMKRYGGFMKKMDELYPMEPEEEANGSEILAKRYGGFMKKDAEEDDSLANSSDLLKELLETGDNRERSHHQDGSDNEEEVSKRYGGFMRGLKRSPQLEDEAKELQKRYGGFMRRVGRPEWWMDYQKRYGGFLKRFAEALPSDEEGESYSKEVPEMEKRYGGFMRF

SEQ ID NO: 200 - protein, 267 aa, Homo sapiens; identical to SEQ ID NO: 199

SEQ ID NO: 201 - protein, 262 aa, Xenopus laevis
MGLEARHCCLFLLVFASLSVAIRADCSKDCASCALRLGQQTEINSLACTLECEGKLPSAKAWGTCKELLQLTKLDGVQDGEKYQDNNDSHYIAKKYGGFMKRYGGFMKKMDELYHAEPEEDDAGGEILAKKYGGFMKKEYDSNRDASDLLRELLATSGDPESAIYHDNNSETPGEMNKRYGGFMRGYRRSTDLEDKTRGIQKRYGGFMRRVGRPEWWQDYQKRYGGFMRRFTDSFLPSDEDGESYSKENPDMEKRYGGFMRF

SEQ ID NO: 202 - protein, 262 aa, Xenopus (Silurana) tropicalis
MGLGARRCCFFLLMFASLSVAIRADCTKDCASCALHLGQQTEINSLACTLECEGKLPSAKAWGTCKELLQLTKVDSVQDGEKYQDNNDSHYAAKKYGGFMKRYGGFMKKMDELYHAEPEEDDAGGEILAKKYGGFMKKEYDSDRDASDLLRELLATSGDPESAIYHDNNSETPGEMNKRYGGFMRGYRRSTDLEDETRGIQKRYGGFMRRVGRPEWWQDYQKRYGGFMRRFTDSFLPSEEDGESYSKENPDMEKRYGGFMRF

SEQ ID NO: 203 - protein, 268 aa, Cavia porcellus
MARLLRLCTWLVALGPGLLATVQAECSQDCAACSYRLVRPGDLNFLACTLECEGQLPSLKIWETCKDLLQVSKQELPQEGASSLRESGKQDESHLLSKKYGGFMKRYGGFMKKVDELYPVEPEEEANGGEILTKRYGGFMKKDAEDGDALANSSDLLKELLGTGDDRDRENHHQEGGDSDEGVSKRYGGFMRGLKRSPQVEDEAKELQKRYGGFMRRVGRPEWWMDYQKRYGGFLKRFAEFLPSDEEGESYSKEVPEMEKRYGGFMRF

SEQ ID NO: 204 - protein, 269 aa, Rattus norvegicus
MAQFLRLCIWLLALGSCLLATVQADCSQDCAKCSYRLVRPGDINFLACTLECEGQLPSFKIWETCKDLLQVSKPEFPWDNIDMYKDSSKQDESHLLAKKYGGFMKRYGGFMKKMDELYPVEPEEEANGGEILAKRYGGFMKKDADEGDTLANSSDLLKELLGTGDNRAKDSHQQESTNNDEDSTSKRYGGFMRGLKRSPQLEDEAKELQKRYGGFMRRVGRPEWWMDYQKRYGGFLKRFAESLPSDEEGESYSKEVPEMEKRYGGFMRF

SEQ ID NO: 205 - protein, 249 aa, Danio rerio
MKTLTVPISCRWTLLLSACLTLTARADCGEDCAYCLQQMPLQLKHLNSIECVLECEEQPNAGSSWSQCKHFMQNADNSPEGNRAATQIEHSNSQQHQVDKKYGGFMKRSESLIKRYGGFMKKAAEFYGLEPEDVDQGRAILTNHDVEMLANQVEADGEREEAALTRSKGGEEGTAKRYGGFMRRGGLYDLESGVRELQKRYGGFMRRVGRPDWWQESKRYGGFLKRSQEQDEDENSSEVEKRYGGFMGY

SEQ ID NO: 206 - protein, 257 aa, Salmo salar
MAVSMRSFWTLALSACLVLTVSADCGADCAYCIHHLQLQQTDINSLTCTLECEGALSPKKSWELCEDVLQARNADSSTEGDKATTETSKPDNNDPHQLVKKYGGFMKRYGGFMKKTAELYGPEPDDVDHGREILFKRYGGFMKKSDEPEDTLSLLRELVRNVDGGDGGVEKRYGGFLRSARQSSDLENGIRELQKRYGGFMRRVGRPEWREEQKRYGGFLNKRAWGEEEEDEMEKEHVELEDVPDVVEKRYGGFLGY

SEQ ID NO: 207 - protein, 269 aa, Rattus norvegicus
MAQFLRLCIWLVALGSCLLATVQADCSQDCAKCSYRLVRPGDINFLACTLECEGQLPSFKIWETCKDLLQVSKPEFPWDNIDMYKDSSKQDESHLLAKKYGGFMKRYGGFMKKMDELYPVEPEEEANGGEILAKRYGGFMKKDADEGDTLANSSDLLKELLGTGDNRAKDSHQQESTNNDEDSTSKRYGGFMRGLKRSPQLEDEAKELQKRYGGFMRRVGRPEWWMDYQKRYGGFLKRFAESLPSDEEGESYSKEVPEMEKRYGGFMRF

SEQ ID NO: 208 - protein, 263 aa, Bos taurus
MARFLGLCTWLLALGPGLLATVRAECSQDCATCSYRLARPTDLNPLACTLECEGKLPSLKTWETCKELLQLTKLELPPDATSALSKQEESHLLAKKYGGFMKRYGGFMKKMDELYPLEVEEEANGGEVLGKRYGGFMKKDAEEDDGLGNSSNLLKELLGAGDQREGSLHQEGSDAEDVSKRYGGFMRGLKRSPHLEDETKELQKRYGGFMRRVGRPEWWMDYQKRYGGFLKRFAEPLPSEEEGESYSKEVPEMEKRYGGFMRF

SEQ ID NO: 209 - protein, 267 aa, Homo sapiens; identical to SEQ ID NO: 199

SEQ ID NO: 210 - protein, 264 aa, Taricha granulosa
MALLLLRNCCRLLLVLATCHIAAVLGECSKDCASCAYRQGARTDINPLTCTLECEGKLPSSKAWDTCKELLQLIKLDLVQQDGESDQDMDANHLLAKKYGGFMKRYGGFMKKMDELYRVEPEEENNGEILAKRYGGFMKKDSDAEAADLLRELLGTGNGDNPEAGHYRDSANDSQGEVSKRYGGFMRGVKRSPEMEEGAKDLHKRYGGFMRRVGRPEWWLDYQKRYGGFMRRFADSSAPSEEEAESYSKEIPEMEKRYGGFMRY

SEQ ID NO: 211 - protein, 267 aa, Homo sapiens; identical to SEQ ID NO: 199

SEQ ID NO: 212 - protein, 257 aa, Salmo salar; identical to SEQ ID NO: 206

SEQ ID NO: 213 - protein, 267 aa, artificial sequence; identical to SEQ ID NO: 199
  Synthetic

SEQ ID NO: 214 - protein, 267 aa, artificial sequence; identical to SEQ ID NO: 199
  Synthetic

SEQ ID NO: 215 - protein, 267 aa, artificial sequence; identical to SEQ ID NO: 199
  Synthetic

SEQ ID NO: 216 - protein, 249 aa, Danio rerio; identical to SEQ ID NO: 205

SEQ ID NO: 217 - protein, 263 aa, Bos taurus; identical to SEQ ID NO: 208

SEQ ID NO: 218 - protein, 691 aa, Homo sapiens
MAGLNCGVSIALLGVLLLGAARLPRGAEAFEIALPRESNITVLIKLGTPTLLAKPCYIVISKRHITMLSIKSGERIVFTFSCQSPENHFVIEIQKNIDCMSGPCPFGEVQLQPSTSLLPTLNRTFIWDVKAHKSIGLELQFSIPRLRQIGPGESCPDGVTHSISGRIDATVVRIGTFCSNGTVSRIKMQEGVKMALHLPWFHPRNVSGFSIANRSSIKRLCIIESVFEGEGSATLMSANYPEGFPEDELMTWQFVVPAHLRASVSFLNFNLSNCERKEERVEYYIPGSTTNPEVFKLEDKQPGNMAGNFNLSLQGCDQDAQSPGILRLQFQVLVQHPQNESNKIYVVDLSNERAMSLTIEPRPVKQSRKFVPGCFVCLESRTCSSNLTLTSGSKHKISFLCDDLTRLWMNVEKTISCTDHRYCQRKSYSLQVPSDILHLPVELHDFSWKLLVPKDRLSLVLVPAQKLQQHTHEKPCNTSFSYLVASAIPSQDLYFGSFCPGGSIKQIQVKQNISVTLRTFAPSFRQEASRQGLTVSFIPYFKEEGVFTVTPDTKSKVYLRTPNWDRGLPSLTSVSWNISVPRDQVACLTFFKERSGVVCQTGRAFMIIQEQRTRAEEIFSLDEDVLPKPSFHHHSFWVNISNCSPTSGKQLDLLFSVTLTPRTVDLTVILIAAVGGGVLLLSALGLIICCV

SEQ ID NO: 219 - protein, 695 aa, Mus musculus
MAHSACGFSVALLGALLLGTARLLRGTEASEIALPQRSGVTVSIKLGNPAVPVKICYIVMSRQHITELIIRAGERKSFTFSCSNPEKHFVLKIEKNVDCMSGPCPFGEVHLQPSTSELPILNRTFIWDVRAHKSIGLELQFATPRLRQIGPGESCADGVTHSISGHIDATEVRIGTFCSNGTVSRIKMQEGVKMALHLPWFHRRNVSGFSIANRSSIKRLCIIESVFEGEGSATLMSANYPGGFPEDELMTWQFVVPAHLRASVSFLNFNVSNCERKEERVEYYIPGSTTNPEVFRLEDKQPGNMAGNFNLSLQGCDQDAQSPGILRLQFQVLVQRPQDESNKTYTVDLSRERTMSLTIEPRPVKHGRRFVPGCFVCLELRTCSTNVTLTAGSIHKISFLCDDLTRLWVNVEKTLSCLDHRYCYRQSFKLQVPDYILQLPVQLHDFSWKLLVPKDKLSLMLVPGQKLQQHTQERPCNTSFGYHVTSTTPGQDLYFGSFCSGGSIEKIQVKQNSSVTLRAYAPSFQQEVSKQGLIVSYTPYFKEEGIFTVTPDTKNKVYLRSPNWDRGLPALSSVSWNISVPSNQVACLTVLKERSGLACQSGRAFMIIQEQQSRAEEIFSLEEEVLPKPSFHHHSFWVNISNCSPMNGKQLDLLFWVTLTPRTVDLAVVIGAAGGGALLLFALVLIICFVKKKKK

SEQ ID NO: 220 - protein, 160 aa, Mus musculus
GGGALLLFALVLIICFVKKKKKVDKGPAVGIYNGNVNTQMPQTQKFPKGRKDNDSHVYAVIEDTMVYGHLLQDSGGSFIQPEVDTYRPFQGPMGDCPPTPPPLFSRTPTAKFTAEELAPSSPPESESEPYTFSHPNKGEIGVRETDIPLLHTQGPVETEE

SEQ ID NO: 221 - protein, 384 aa, Mus musculus
LLVPKDKLSLMLVPGQKLQQHTQERPCNTSFGYHVTSTTPGQDLYFGSFCSGGSIEKIQVKQNSSVTLRAYAPSFQQEVSKQGLIVSYTPYFKEEGIFTVTPDTKNKVYLRSPNWDRGLPALSSVSWNISVPSNQVACLTVLKERSGLACQSGRAFMIIQEQQSRAEEIFSLEEEVLPKPSFHHHSFWVNISNCSPMNGKQLDLLFWVTLTPRTVDLAVVIGAAGGGALLLFALVLIICFVKKKKKVDKGPAVGIYNGNVNTQMPQTQKFPKGRKDNDSHVYAVIEDTMVYGHLLQDSGGSFIQPEVDTYRPFQGPMGDCPPTPPPLFSRTPTAKFTAEELAPSSPPESESEPYTFSHPNKGEIGVRETDIPLLHTQGPVETEE

SEQ ID NO: 222 - protein, 697 aa, Homo sapiens
MAGLNCGVSIALLGVLLLGAARLPRGAEAFEIALPRESNITVLIKLGTPTLLAKPCYIVISKRHITMLSIKSGERIVFTFSCQSPENHFVIEIQKNIDCMSGPCPFGEVQLQPSTSLLPTLNRTFIWDVKAHKSIGLELQFSIPRLRQIGPGESCPDGVTHSISGRIDATVVRIGTFCSNGTVSRIKMQEGVKMALHLPWFHPRNVSGFSIANRSSIKRLCIIESVFEGEGSATLMSANYPEGFPEDELMTWQFVVPAHLRASVSFLNFNLSNCERKEERVEYYIPGSTTNPEVFKLEDKQPGNMAGNFNLSLQGCDQDAQSPGILRLQFQVLVQHPQNESNKIYVVDLSNERAMSLTIEPRPVKQSRKFVPGCFVCLESRTCSSNLTLTSGSKHKISFLCDDLTRLWMNVEKTISCTDHRYCQRKSYSLQVPSDILHLPVELHDFSWKLLVPKDRLSLVLVPAQKLQQHTHEKPCNTSFSYLVASAIPSQDLYFGSFCPGGSIKQIQVKQNISVTLRTFAPSFRQEASRQGLTVSFIPYFKEEGVFTVTPDTKSKVYLRTPNWDRGLPSLTSVSWNISVPRDQVACLTFFKERSGVVCQTGRAFMIIQEQRTRAEEIFSLDEDVLPKPSFHHHSFWVNISNCSPTSGKQLDLLFSVTLTPRTVDLTVILIAVVGGGVLLLSALGLIICCVKKKKKK

SEQ ID NO: 223 - protein, 452 aa, Xenopus (Silurana) tropicalis
MKKFAYCKVVLATSLVWVFLDMFLLLYFSECNKCDDKKERGLPGGDGPDINQKPHEGPGEMGKPVVIPKEEQEKMKEMFKINQFNLMASEMIALNRSLPDVRLEGCKTKVYPDSLPTTSVVIVFHNEAWTTLLRTVHSVINRSPRHLLQEIILVDDASEREFLKRPLETYVKKLTVPVHVLRMEQRSGLIRARLRGAAASKGQVITFLDAHCECTVGWLEPLLARIKHDRRTVVCPIIDVISDDTFEYMAGSDMTYGGFNWKLNFRWYPVPQREMDRRRGDRTLPVRTPTMAGGLFSIDRDYFQEIGTYDAGMDIWGGENLEISFRIWQCGGTLEIVTCSHVGHVFRKATPYTFPGGTGQIINKNNRRLAEVWMDEFKNFFYIISPGVTKVDYGDISTRVGLRHKLQCKPFSWYLENVYPDSQIPRHYYSLGEVSNIIIKLCFINVILLIHI

SEQ ID NO: 224 - protein, 105 aa, Homo sapiens; identical to SEQ ID NO: 19

SEQ ID NO: 225 - protein, 499 aa, Homo sapiens [sequence omitted]

SEQ ID NO: 226 - protein, 559 aa, Homo sapiens
MRKFAYCKVVLATSLIWVLLDMFLLLYFSECNKCDEKKERGLPAGDVLEPVQKPHEGPGEMGKPVVIPKEDQEKMKEMFKINQFNLMASEMIALNRSLPDVRLEGCKTKVYPDNLPTTSVVIVFHNEAWSTLLRTVHSVINRSPRHMIEEIVLVDDASERDFLKRPLESYVKKLKVPVHVIRMEQRSGLIRARLKGAAVSKGQVITFLDAHCECTVGWLEPLLARIKHDRRTVVCPIIDVISDDTFEYMAGSDMTYGGFNWKLNFRWYPVPQREMDRRKGDRTLPVRTPTMAGGLFSIDRDYFQEIGTYDAGMDIWGGENLEISFRIWQCGGTLEIVTCSHVGHVFRKATPYTFPGGTGQIINKNNRRLAEVWMDEFKNFFYIISPGVTKVDYGDISSRVGLRHKLQCKPFSWYLENIYPDSQIPRHYFSLGEIRNVETNQCLDNMARKENEKVGIFNCHGMGGNQVFSYTANKEIRTDDLCLDVSKLNGPVTMLKCHHLKGNQLWEYDPVKLTLQHVNSNQCLDKATEEDSQVPSIRDCNGSRSQQWLLRNVTLPEIF

SEQ ID NO: 227 - protein, 559 aa, Xenopus laevis
MKKFAYCKVVLATSLVWVFLDMFLLLYFSECNKCDDKKERGLPGGDGPDISLKPQEGPGEMGKPVVILKEEQERMKEMFKINQFNLMASEMIALNRSLPDVRLEGCKTKVYPDNLPTTSVVIVFHNEAWTTLLRTVHSVINRSPRHLLREIVLVDDASERDFLKRALETYVKKLSVPVHVIRMEQRSGLIRARLRGAAASKGQVITFLDAHCECTVGWLEPLLARINHDRRTVVCPIIDVISDDTFEYMAGSDMTYGGFNWKLNFRWYPVPQREMDRRRGDRTLPVRTPTMAGGLFSIDRDYFQEIGTYDAGMDIWGGENLEISFRIWQCGGTLEIVTCSHVGHVFRKATPYTFPGGTGQIINKNNRRLAEVWMDEFKNFFYIISPGVTKVDYGDIATRVGLRHKLQCKPFSWYLENVYPDSQIPRHYYSLGEIRNVETNQCLDNMARKENEKVGIFNCHGMGGNQVFSYTASKEIRTDDLCLDVSKLNGPVIMLKCHHLRGNQLWEYDPVKLTLVHVNSNQCLDKAAEEDSQVPSIRDCNGGHSQQWLLRNVTLPENL

SEQ ID NO: 228 - protein, 559 aa, Mus musculus
MRKFAYCKVVLATSLVWVLLDMFLLLYFSECNKCEEKQERGLPAGDVLELVQKPHEGPGEMGKPVVIPKEDQEKMKEMFKINQFNLMASEMIALNRSLPDVRLEGCKTKVYPDNLPTTSVVIVFHNEAWSTLLRTVHSVINRSPRHMIEEIVLVDDASERDFLKRPLESYVKKLKVPVHVIRMEQRSGLIRARLKGAAVSRGQVITFLDAHCECTAGWLEPLLARIKHDRRTVVCPIIDVISDDTFEYMAGSDMTYGGFNWKLNFRWYPVPQREMDRRKGDRTLPVRTPTMAGGLFSIDRDYFQEIGTYDAGMDIWGGENLEISFRIWQCGGTLEIVTCSHVGHVFRKATPYTFPGGTGQIINKNNRRLAEVWMDEFKNFFYIISPGVTKVDYGDISSRLGLRRKLQCKPFSWYLENIYPDSQIPRHYFSLGEIRNVETNQCLDNMARKENEKVGIFNCHGMGGNQVFSYTANKEIRTDDLCLDVSKLNGPVTMLKCHHLKGNQLWEYDPVKLTLQHVNSNQCLDKATEEDSQVPSIRDCTGSRSQQWLLRNVTLPEIF

SEQ ID NO: 229 - protein, 559 aa, Mus musculus; identical to SEQ ID NO: 228

SEQ ID NO: 230 - protein, 559 aa, Rattus norvegicus
MRKFAYCKVVLATSLVWVLLDMFLLLYFSECNKCEEKKERGLPAGDVLELVQKPHEGPGEMGKPVVIPKEDQEKMKEMFKINQFNLMASEMIAFNRSLPDVRLEGCKTKVYPDSLPTTSVVIVFHNEAWSTLLRTVHSVINRSPRHMIEEIVLVDDASERDFLKRPLESYVKKLKVPVHVIRMEQRSGLIRARLKGAAVSKGQVITFLDAHCECTVGWLEPLLARIKHDRRTVVCPIIDVISDDTFEYMAGSDMTYGGFNWKLNFRWYPVPQREMDRRKGDRTLPVRTPTMAGGLFSIDRDYFQEIGTYDAGMDIWGGENLEISFRIWQCGGTLEIVTCSHVGHVFRKATPYTFPGGTGQIINKNNRRLAEVWMDEFKNFFYIISPGVTKVDYGDISSRVGLRHKLQCKPFSWYLENIYPDSQIPRHYFSLGEIRNVETNQCLDNMARKENEKVGIFNCHGMGGNQVFSYTANKEIRTDDLCLDVSKLNGPVTMLKCHHLKGNQLWEYDPVKLTLQHVNSNQCLDKATEEDSQVPSIRDCTGSRSQQWLLRNVTLPEIF

SEQ ID NO: 231 - protein, 559 aa, Bos taurus
MRKFAYCKVVLATSLIWVLLDMFLLLYFSECNKCDEKKERGLPAGDVLEPVQKPHEGPGEMGKPVVIPKEDQEKMKEMFKINQFNLMASEMIALNRSLPDVRLEGCKTKVYPDNLPTTSVVIVFHNEAWSTLLRTVHSVINRSPRHMLEEIVLVDDASERDFLKRPLESYVKKLKVPVHVIRMEQRSGLIRARLKGAAVSKGQVITFLDAHCECTVGWLEPLLARIKHDRKTVVCPIIDVISDDTFEYMAGSDMTYGGFNWKLNFRWYPVPQREMDRRKGDRTLPVRTPTMAGGLFSIDRDYFQEIGTYDAGMDIWGGENLEISFRIWQCGGTLEIVTCSHVGHVFRKATPYTFPGGTGQIINKNNRRLAEVWMDEFKNFFYIISPGVTKVDYGDISSRLGLRHKLQCRPFSWYLENIYPDSQIPRHYFSLGEIRNVETNQCLDNMARKENEKVGIFNCHGMGGNQVFSYTANKEIRTDDLCLDVSKLNGPVTMLKCHHLKGNQLWEYDPVKLTLQHVNSNQCLDKATDEDSQVPSIRDCSGSRSQQWLLRNVTLPEIF

SEQ ID NO: 232 - protein, 559 aa, Mus musculus; identical to SEQ ID NO: 228

SEQ ID NO: 233 - protein, 559 aa, Mus musculus
MRKFAYCKVVLATSLVWVLLDMFLLLYFSECNKCEEKQERGLPAGDVLELVQKPHEGPGEMGKPVVIPKEDQEKMKEMFKTNQFNLMASEMIALNRSLPDVRLEGCKTKVYPDNLPTTSVVIVFHNEAWSTLLRTVHSVINRSPRHMIEEIVLVDDASERDFLKRPLESYVKKLKVPVHVIRMEQRSGLIRARLKGAAVSRGQVITFLDAHCECTAGWLEPLLARIKHDRRTVVCPIIDVISDDTFEYMAGSDMTYGGFNWKLNFRWYPVPQREMDRRKGDRTLPVRTPTMAGGLFSIDRDYFQEIGTYDAGMDIWGGENLEISFRIWQCGGTLEIVTCSHVGHVFRKATPYTFPGGTGQIINKNNRRLAEVWMDEFKNFFYIISPGVTKVDYGDISSRLGLRRKLQCKPFSWYLENIYPDSQIPRHYFSLGEIRNVETNQCLDNMARKENEKVGIFNCHGMGGNQVFSYTANKEIRTDDLCLDVSKLNGPVTMLKCHHLKGNQLWEYDPVKLTLQHVNSNQCLDKATEEDSQVPSIRDCTGSRSQQWLLRNVTLPEIF

SEQ ID NO: 234 - protein, 559 aa, artificial sequence; identical to SEQ ID NO: 226
  Synthetic

SEQ ID NO: 235 - protein, 452 aa, Xenopus (Silurana) tropicalis; identical to SEQ ID NO: 223

SEQ ID NO: 236 - protein, 559 aa, Gallus gallus
MKKFAYCKVVLATSLVWVLLDMFLLLYFSECNKCDEKKERGLPAGDVPEPIQKPHEGPGEMGKPVVIPKEEQEKMKEMFKINQFNLMASEMIALNRSLPDVRLEGCKTKVYADNLPTTSVVIVFHNEAWSTLLRTVHSVINRSPRHMLEEIVLVDDASERDFLKRPLESYVKKLKVPVHVIRMEQRSGLIRARLKGAAASKGQVITFLDAHCECTVGWLEPLLARIKADRRTVVCPIIDVISDDTFEYMAGSDMTYGGFNWKLNFRWYPVPQREMDRRKGDRTLPVRTPTMAGGLFSIDRDYFQEIGTYDAGMDIWGGENLEISFRIWQCGGTLEIVTCSHVGHVFRKATPYTFPGGTGQIINKNNRRLAEVWMDEFKNFFYIISPGVTKVDYGDISSRLGLRRKLQCKPFSWYLENVYPDSQIPRHYFSLGEIRNVETNQCLDNMARKENEKVGIFNCHGMGGNQVFSYTANKEIRTDDLCLDVSKLNGPVTMLKCHHLKGNQLWEYDPVKLTLLHVNSNQCLDKATEEDSQVPSIRDCNGSRSQQWLLRNVTLPEIF

SEQ ID NO: 237 - protein, 559 aa, Homo sapiens; identical to SEQ ID NO: 226

SEQ ID NO: 238 - protein, 559 aa, Homo sapiens; identical to SEQ ID NO: 226

SEQ ID NO: 239 - protein, 170 aa, Homo sapiens
KEAYGDISSRVGLRHKLQCKPFSWYLENIYPDSQIPRHYFSLGEIRNVETNQCLDNMARKENEKVGIFNCHGMGGNQVFSYTANKEIRTDDLCLDVSKLNGPVTMLKCHHLKGNQLWEYDPVKLTLQHVNSNQCLDKATEEDSQVPSIRDCNGSRSQQWLLRNVTLPEIF

SEQ ID NO: 240 - protein, 559 aa, Rattus norvegicus; identical to SEQ ID NO: 230

SEQ ID NO: 241 - protein, 400 aa, Mus musculus
RNFLKRPLESYVKKLKVPVHVIRMEQRSGLIRARLKGAAVSRGQVITFLDAHCECTAGWLEPLLARIKHDRRTVVCPIIDVISDDTFEYMAGSDMTYGGFNWKLNFRWYPVPQREMDRRKGDRTLPVRTPTMAGGLFSIDRDYFQEIGTYDAGMDIWGGENLEISFRIWQCGGTLEIVTCSHVGHVFRKATPYTFPGGTGQIINKNNRRLAEVWMDEFKNFFYIISPGVTKVDYGDISSRLGLRRKLQCKPFSWYLENIYPDSQIPRHYFSLGEIRNVETNQCLDNMARKENEKVGIFNCHGMGGNQVFSYTANKEIRTDDLCLDVSKLNGPVTMLKCHHLKGNQLWEYDPVKLTLQHVNSNQCLDKATEEDSQVPSIRDCTGSRSQQWLLRNVTLPEIF

SEQ ID NO: 242 - protein, 400 aa, Mus musculus; identical to SEQ ID NO: 241

SEQ ID NO: 243 - protein, 422 aa, Homo sapiens
MPAGRRGPAAQSARRPPPLLPLLLLLCVLGAPRAGSGAHTAVISPQDPTLLIGSSLLATCSVHGDPPGATAEGLYWTLNGRRLPPELSRVLNASTLALALANLNGSRQRSGDNLVCHARDGSILAGSCLYVGLPPEKPVNISCWSKNMKDLTCRWTPGAHGETFLHTNYSLKYKLRWYGQDNTCEEYHTVGPHSCHIPKDLALFTPYEIWVEATNRLGSARSDVLTLDILDVVTTDPPPDVHVSRVGGLEDQLSVRWVSPPALKDFLFQAKYQIRYRVEDSVDWKVVDDVSNQTSCRLAGLKPGTVYFVQVRCNPFGIYGSKKAGIWSEWSHPTAASTPRSERPGPGGGACEPRGGEPSSGPVRRELKQFLGWLKKHAYCSNLSFRLYDQWRAWMQKSHKTRNQDEGILPSGRRGTARGPAR

SEQ ID NO: 244 - protein, 389 aa, Danio rerio
MICLLFLHLCAAGVLSSSTQVATIYPQDPALLIGSSLTATCSVNPDHGIHAGSLYWTLNGKRLPSSTYSILSPTVISVTLPRLSGSRQRSGDNLVCHNGGGHVLAGSCIYVGMPPEKPVNLTCWSRNTKDLTCRWAPGGQGETFIKTKYTLKYKLRWYGREKECEDYSTGEPYTCYIPRDLALFTPYEIWVEASNQLGTATSDVIYLDILDVVTTDPPTDVTVSRVGDLEDQLTVRWGTPPALKDFLFQAKYQIRYRLEESSDWKVVDDVGNQTSCRLAGLRPGTVYFVQVRCNPVGILGSRKAGIWSDWSHPTAASTPHSERLLTGSCDSKAGQQNSTLRRDLKQFFGWVRKHAYGCSGMSIKLYDQWRVWLQKSHKTRNQVLQGDKS

SEQ ID NO: 245 - protein, 75 aa, Mus musculus
RTRAPICTPQTRPRPVRRELKQFLGWLKKHAYCSNLSFRLYDQWRAWMQKSHKTRNQDEGILPSGRRGAARGPAG

SEQ ID NO: 246 - protein, 83 aa, Mus musculus
GPEPQSAPRRLAPAPYRRCSHRPVRRELKQFLGWLKKHAYCSNLSFRLYDQWRAWMQKSHKTRNQDEGILPSGRRGAARGPAG

SEQ ID NO: 247 - protein, 422 aa, Homo sapiens; identical to SEQ ID NO: 243

SEQ ID NO: 248 - protein, 425 aa, Mus musculus
MPAGRPGPVAQSARRPPRPLSSLWSPLLLCVLGVPRGGSGAHTAVISPQDPTLLIGSSLQATCSIHGDTPGATAEGLYWTLNGRRLPSELSRLLNTSTLALALANLNGSRQQSGDNLVCHARDGSILAGSCLYVGLPPEKPFNISCWSRNMKDLTCRWTPGAHGETFLHTNYSLKYKLRWYGQDNTCEEYHTVGPHSCHIPKDLALFTPYEIWVEATNRLGSARSDVLTLDVLDVVTTDPPPDVHVSRVGGLEDQLSVRWVSPPALKDFLFQAKYQIRYRVEDSVDWKVVDDVSNQTSCRLAGLKPGTVYFVQVRCNPFGIYGSKKAGIWSEWSHPTAASTPRSERPGPGGGVCEPRGGEPSSGPVRRELKQFLGWLKKHAYCSNLSFRLYDQWRAWMQKSHKTRNQDEGILPSGRRGAARGPAG

SEQ ID NO: 249 - protein, 425 aa, artificial sequence; identical to SEQ ID NO: 248
  Synthetic

SEQ ID NO: 250 - protein, 422 aa, Homo sapiens; identical to SEQ ID NO: 243

SEQ ID NO: 251 - protein, 422 aa, artificial sequence; identical to SEQ ID NO: 243
  Synthetic

SEQ ID NO: 252 - protein, 422 aa, artificial sequence; identical to SEQ ID NO: 243
  Synthetic

SEQ ID NO: 253 - protein, 425 aa, Rattus norvegicus
MPAGGPGPAAQSARRPPRRLSSLWSPLLLCVLGVPQGGSGAHTAVISPQDPTLLIGSSLHATCSIHGDTPGATAEGLYWTLNGRRLPSELSRLLNTSTLALALANLNGSRQQSGDNLVCHARDGSILAGSCLYVGLPPEKPFNISCWSRNMKDLTCRWTPGAHGETFLHTNYSLKYKLRWYGQDNTCEEYHTVGPHSCHIPKDLALFTPYEIWVEATNRLGSARSDVLTLDVLDVVTTDPPPDVHVSRVGGLEDQLSVRWVSPPALKDFLFQAKYQIRYRVEDSVDWKVVDDVSNQTSCRLAGLKPGTVYFVQVRCNPFGIYGSKKAGIWSEWSHPTAASTPRSERPGPGGGVCEPRGGEPSSGPVRRELKQFLGWLKKHAYCSNLSFRLYDQWRAWMQKSHKTRNQDEGILPSGRRGAARGPAG

SEQ ID NO: 254 - protein, 425 aa, Mus musculus; identical to SEQ ID NO: 248

SEQ ID NO: 255 - protein, 309 aa, Danio rerio
GETPTCNAGVRCSTPPKVVNALITSKPKLFYIDKSIVTYACRSPFTMKGQSTVSCLNGQWEETPICEGGDQCDAPPKVENADITSKHEDFYVDGSSVTYACRTPFSMKGESTVFCRFGIWEEPPTCEAKCPRPFENFMELEKDKDEYDNKETLKYKCLKPYNKIPEGEWICENGKWTGDFVCTSDICPPPPYIENGSYNSRNPDDNIPTEVSYKCNSYYVLSGRKEYFRCENGGWETPPKCLKPCVFSQDILEAHNMKLDQRTTFLMHNHFDYYYCKDGWTTARRGYHYMKVTCLDGKSDIKSCQKDTN

SEQ ID NO: 256 - protein, 393 aa, Rattus norvegicus
MGFCNLLLLTTVFLTLWFTTSKGEGIACKPPYIPNGIYSPHKINYTIDDEIKYECKNGFYPATKGTVAKCTSTGWIPLPRCSLKPCDFPQFKHGRLYYEESRRPYFPVPIGKEYSYYCDNGFTTPSQSYWDYLRCTVNGWEPEVPCLRQCIFHYVENGESSYWQRRYIEGQSAKVQCYSGYSLPNGQDTMICTENGWSPPPKCVRIKSCDMPVFENAVIKNNSTWFKLNDKIDYECHDGYENKYKQTKGSITCNDDGWSDKPSCYDSTKICGPPPPIDNGDTTSFPLQRYIPSSSVEYQCQSLYQLQGNKTIICINGEWSDPPKCLHPCIISKEIMEKHNITFRWEEKQKRYYQSGETQEFKCKNGHHLATTQPLITICINGQINYPTCTKSH

SEQ ID NO: 257 - protein, 689 aa, Rattus norvegicus
MRLSARIIWLILWTVCVAEDCKGPPPRENSEILSGSWSEQLYSEGTQATYKCRPGYRTLGTIVKVCKNGEWVPSNPSRICRKRPCGHPGDTPFGSFRLAVGSEFEFGAKVVYTCDEGYQLLGEIDYRECDADGWTNDIPICEVVKCLPVTELENGRIVSGAAEPDQEYYFGQVVRFECNSGFKIEGQKEMHCSENGLWSNEKPQCVEISCLPPRVENGDGIYLKPVYKENERFQYKCKQGFVYKERGDAVCTGSGWNPQPSCEEMTCLTPYIPNGIYTPHRIKHRIDDEIRYECKNGFYPATRSPVSKCTITGWIPAPRCSLKPCDFPQFKHGRLYYEESRRPYFPVPIGKEYSYYCDNGFTTPSQSYWDYLRCTVNGWEPEVPCLRQCIFHYVEYGESLYWQRRYIEGQSAKVQCHSGYSLPNGQDTILCTENGWSPPPKCVRIKTDCDNLPTFEIAKPTEKKKKSYRSGEQVTFRCPPPYRMDGSDIVTCVNTKWIGQPVCKDNSCVNPPHVPNATILTRHKTKYPSGDKVRYDCNKPFELFGEVEVMCQNGIWTEPPKCKDSTGKCGPPPPIDNGDITSLSLPVYAPLSSVEYQCQNYYLLKGNKIVTCRNGKWSQPPTCLHACVIPEDIMEKHNIVLRWRENAKIYSQSGENIEFMCKPGYRKFRGSPPFRTKCIEGHINYPTCV

SEQ ID NO: 258 - protein, 1252 aa, Mus musculus
MVQHRFLLESVGPRKIQIMRLSARIIWLILWTVCAAEDCKGPPPRENSEILSGSWSEQLYPEGTQATYKCRPGYRTLGTIVKVCKNGKWVASNPSRICRKKPCGHPGDTPFGSFRLAVGSQFEFGAKVVYTCDDGYQLLGEIDYRECGADGWINDIPLCEVVKCLPVTELENGRIVSGAAETDQEYYFGQVVRFECNSGFKIEGHKEIHCSENGLWSNEKPRCVEILCTPPRVENGDGINVKPVYKENERYHYKCKHGYVPKERGDAVCTGSGWSSQPFCEEKRCSPPYILNGIYTPHRIIHRSDDEIRYECNYGFYPVTGSTVSKCTPTGWIPVPRCTLKPCEFPQFKYGRLYYEESLRPNFPVSIGNKYSYKCDNGFSPPSGYSWDYLRCTAQGWEPEVPCVRKCVFHYVENGDSAYWEKVYVQGQSLKVQCYNGYSLQNGQDTMTCTENGWSPPPKCIRIKTCSASDIHIDNGFLSESSSIYALNRETSYRCKQGYVTNTGEISGSITCLQNGWSPQPSCIKSCDMPVFENSITKNTRTWFKLNDKLDYECLVGFENEYKHTKGSITCTYYGWSDTPSCYERECSVPTLDRKLVVSPRKEKYRVGDLLEFSCHSGHRVGPDSVQCYHFGWSPGFPTCKGQVASCAPPLEILNGEINGAKKVEYSHGEVVKYDCKPRFLLKGPNKIQCVDGNWTTLPVCIEEERTCGDIPELEHGSAKCSVPPYHHGDSVEFICEENFTMIGHGSVSCISGKWTQLPKCVATDQLEKCRVLKSTGIEAIKPKLTEFTHNSTMDYKCRDKQEYERSICINGKWDPEPNCTSKTSCPPPPQIPNTQVIETTVKYLDGEKLSVLCQDNYLTQDSEEMVCKDGRWQSLPRCIEKIPCSQPPTIEHGSINLPRSSEERRDSIESSSHEHGTTFSYVCDDGFRIPEENRITCYMGKWSTPPRCVGLPCGPPPSIPLGTVSLELESYQHGEEVTYHCSTGFGIDGPAFIICEGGKWSDPPKCIKTDCDVLPTVKNAIIRGKSKKSYRTGEQVTFRCQSPYQMNGSDTVTCVNSRWIGQPVCKDNSCVDPPHVPNATIVTRTKNKYLHGDRVRYECNKPLELFGQVEVMCENGIWTEKPKCRDSTGKCGPPPPIDNGDITSLSLPVYEPLSSVEYQCQKYYLLKGKKTITCRNGKWSEPPTCLHACVIPENIMESHNIILKWRHTEKIYSHSGEDIEFGCKYGYYKARDSPPFRTKCINGTINYPTCV

SEQ ID NO: 259 - protein, 502 aa, Xenopus laevis
MPEYLQVYIIALCCIAIGAQAPCDRPQRTAEEELQGTWDKDSYDHGTIASYICRPGYSRLGAIKKQCSNGIWTYLARGLCKKKSCGHPGDIPNGSFELKGETEFVFGAIVEYECDSGYQMLSKVSTRTCTANGWSNFLPNCEVKNCPPVELTEGVEIASSYDDEYTVGKVIRFQCKNPKYKLNGIGEIFCTSEGVWSALAPKCEEIKCSVPDLANGRINARKEIYYLDDKLLYTCDEKFKKDRSIDPTCTKNGWSPEPMCYEITCQADYVANGFITNKKNTYRLGDTVEVECKHGFSLDKPNEPRICTLNGWSLPLTCIDKICDRPDLQNGMIYSGANFPARKNADLWYNCNGNFDPVYKETYRWYNRGEYGKSTCTEYGWNPMPKCLALCWHSAARVDNADIYHTKNQYKEGDSVRFKCYGDLRTEDGRNDGEIECLPNHKFSETRCLKYCTIESISHGNYFPKKSIFEHEESLVYECDEGYRSPTKTRNHLLHNRITRGI

SEQ ID NO: 260 - protein, 781 aa, Xenopus (Silurana) tropicalis
MSLTGYLQVYITALCCIAIGAQAPCDRPERTAEEELQGTWDKDSYNHGTIASYICRPGYSRLGAIKKQCDNGKWKYLARGLCKKKSCGHPGDIPNGSFELDGENEFVFGVIVTYSCDSGYQMVSKVTTRTCTANGWSNFLPNCEAKNCPPVELTEGVEIVSSYDDEYTVGKVIRFQCKNPKFKLNGVAEIFCTSEGDWNAPPPECEEIKCSAPVLPNGRINARKETYYLDDKLLYVCNGNYKKERSIDPVCTKNGWAPEPTCNEITCTADYVPNGSVKNKKIMYRLGDTIELECKYGFVLDKPDEPRICTLNGWSLPLTCVDKICDRPFIQNGRLYSEMNFPSRRNTELWYICNDNFDPLDKIYYSWSRRYYGKSICTENGWDPKPKCFALCWDSSARVDYADIYYTKRRYMEGERVKFQCYGDRRTEDGRNGGDIECLPNHKFSEARCLKSCMIESVSHGRYIPNKKMFEHGETLVYECDEGYRSTKNTRFDSATCPWTSPPRCVETTCHIAELNEEYKAGDVVQFACSRGYELVGQEVSQCYYYGWSPELPTCRDDYYGQENRYRLITKKQVDLSVCAPAPKPPRSQDSEIGNITYHNDSTVEIRCASQYRALGSKSIKCENGKWQSPPQCIELHYCNQPPIIENGNITTEKQYYSNGDVVKYQCNPGYEISGSSESLCFSQQWTGPPVCKGKSCDQPPDIENAVVSGLKQQYKHGESAKYTCQVGYTISEDVQAKCVEGKWRNVPKCLSTSCESAPEISNAMLLNKKNNYNSGDRAFF

SEQ ID NO: 261 - protein, 1231 aa, Homo sapiens [sequence omitted]

SEQ ID NO: 262 - protein, 1235 aa, Rattus norvegicus
MRLSARIIWLILWTVCVAEDCKGPPPRENSEILSGSWSEQLYSEGTQATYKCRPGYRTLGTIVKVCKNGEWVPSNPSRICRKRPCGHPGDTPFGSFRLAVGSEFEFGAKVVYTCDEGYQLLGEIDYRECDADGWTNDIPICEVVKCLPVTELENGRIVSGAAEPDQEYYFGQVVRFECNSGFKIEGQKEMHCSENGLWSNEKPQCVEISCLPPRVENGDGIYLKPVYKENERFQYKCKQGFVYKERGDAVCTGSGWNPQPSCEEMTCLTPYIPNGIYTPHRIKHRIDDEIRYECKNGFYPATRSPVSKCTITGWIPAPRCSLKPCDFPQFKHGRLYYEESRRPYFPVPIGKEYSYYCDNGFTTPSQSYWDYLRCTVNGWEPEVPCLRQCIFHYVEYGESLYWQRRYIEGQSAKVQCHSGYSLPNGQDTILCTENGWSPPPKCVRIKTCSVSDIEIENGFFSESDYTYALNRKTRYRCKQGYVTNTGEISGIITCLQDGWSPRPSCIKSCDMPVFENAMTKNNNTWFKLNDKLDYECHIGYENEYKHTKGSITCTYDGWSSTPSCYERECSIPLLHQDLVVFPREVKYKVGDSLSFSCRSGHRVGADLVQCYHFGWSPNFPTCEGQVKSCDQPLEIPNGEIKGTKKVEYSHGDVVEYDCKPRFLLKGPNKIQCVDGKWTTLPICVEYERTCGDLPALEHGSVQLSVPPYHHGDSVEFTCAETFTMIGHAVVFCISGRWTELPQCVATDQLEKCKAPKSTGIDAIHPNKNEFNHNFSVSYRCRQKQEYEHSICINGRWDPEPNCTRNEKRFCPPPPQIPNAQVIETTVKYLDGEKVSVLCQDGYLTQGPEEMVCKHGRWQSLPRCTEKIPCSQPPKIEHGSIKSPRSSEERDLIESSSYEHGTTFSYVCDDGFRISEENRVTCNMGKWSSLPRCVGIPCGPPPSIPLGIVSHELESYQYGEEVTYNCSEGFGIDGPAFIKCVGGQWSEPPKCIKTDCDNLPTFEIAKPTEKKKKSYRSGEQVTFRCPPPYRMDGSDIVTCVNTKWIGQPVCKDNSCVNPPHVPNATILTRHKTKYPSGDKVRYDCNKPFELFGEVEVMCQNGIWTEPPKCKDSTGKCGPPPPIDNGDITSLSLPVYAPLSSVEYQCQNYYLLKGNKIVTCRNGKWSQPPTCLHACVIPEDIMEKHNIVLRWRENAKIYSQSGENIEFMCKPGYRKFRGSPPFRTKCIEGHINYPTCV

SEQ ID NO: 263 - protein, 1236 aa, Bos taurus
MRFPAKIVWLVLWTVCVAEDCKEPPPRKETEILSGSWTEQTYQEGTQATYKCRPGYRTLGSIVMMCRGGKWVSLHPSRICRKKPCAHPGDTPFGSFHLAEGTQFEYGAKVVYTCDEGYQMVGEMNFRECDTNGWTNDIPICEVVKCLPVTEPENGKIFSDALEPDQEYTYGQVVQFECNSGYMLDGPKQIHCSAGGVWSAETPKCVEIFCKTPVILNGQAVLPKATYKANERVQYRCAAGFEYGQRGDTICTKSGWTPAPTCIEITCDPPRIPNGVYRPELSKYRGQDKITYECKKGFFPEIRGTDATCTRDGWVPVPRCAWKPCSYPVIKHGRLYYSYRGYFPARVNQQFVYSCDHHFVPPSQRSWDHLTCTAEGWSPEEPCLRQCIFNYLENGHTPYREEKYLQGETVRVRCYEGYSLQNDQNTMTCTESGWSPPPRCIRVKTCSKSNIRIENGFLSESTFTYPLNKQTEYKCKPGYVTADGKTSGLITCLKNGWSAQPVCIKSCDRPVFEKARVKSDGTWFRLNDRLDYECVDGYENRDGRTTGSIVCGQDGWSDKAACYERECSIPEMDPYLNAYPRKETYKVGDVLKFSCSQGRIMVGADSVQCYHFGWSPKLPTCKVKKVKSCALPPELPNGKRKEIHKEEYAHNEVVEYACNPRFLMKGSHKIQCVDGEWTALPVCIEEERTCGNIPDLDHGDVKPSVPPYHHGDSVEFSCREAFTMIGPRFITCISGEWTQPPQCIATDELRKCKGSTLFPPEGRQAHKIEYDHNTNKSYQCRGKSEHKHSICINGEWDPKVDCNEEAKIQLCPPPPQVPNACDMTTTVNYQDGEKISILCKENYLIQDAEEIVCKDGRWQSIPRCIEKIGCSQPPQIDHGTISSSSSAEERREIHEQRLYAHGTKLSYTCEEGFEISENNVIICHMGKWSSPPQCVGLPCGLPPYVQNGVVSHKKDRYQYGEEVTYDCDEGFGTDGPASIRCLGGEWSRPQDCISTNCVNLPTFEDAVLTDREKDFYRSGEQVAFKCLSYYQLDGSNTIQCIKSKWIGRPACRDVSCGNPPQVENAIIHNQKSKYQSEERARYECIGNYDLFGEMEVVCLNGTWTEPPQCKDSQGKCGPPPPIDNGDITSLLQSVYPPGMIVEYRCQAYYELRGNKNVVCRNGEWSQLPKCLEACVISEETMRKHHIQLRWKHDKKIYSKTEDTIEFMCQHGYRQLTPKHTFRATCREGKVVYPRCG

SEQ ID NO: 264 - protein, 1234 aa, Mus musculus
MRLSARIIWLILWTVCAAEDCKGPPPRENSEILSGSWSEQLYPEGTQATYKCRPGYRTLGTIVKVCKNGKWVASNPSRICRKKPCGHPGDTPFGSFRLAVGSQFEFGAKVVYTCDDGYQLLGEIDYRECGADGWINDIPLCEVVKCLPVTELENGRIVSGAAETDQEYYFGQVVRFECNSGFKIEGHKEIHCSENGLWSNEKPRCVEILCTPPRVENGDGINVKPVYKENERYHYKCKHGYVPKERGDAVCTGSGWSSQPFCEEKRCSPPYILNGIYTPHRIIHRSDDEIRYECNYGFYPVTGSTVSKCTPTGWIPVPRCTLKPCEFPQFKYGRLYYEESLRPNFPVSIGNKYSYKCDNGFSPPSGYSWDYLRCTAQGWEPEVPCVRKCVFHYVENGDSAYWEKVYVQGQSLKVQCYNGYSLQNGQDTMTCTENGWSPPPKCIRIKTCSASDIHIDNGFLSESSSIYALNRETSYRCKQGYVTNTGEISGSITCLQNGWSPQPSCIKSCDMPVFENSITKNTRTWFKLNDKLDYECLVGFENEYKHTKGSITCTYYGWSDTPSCYERECSVPTLDRKLVVSPRKEKYRVGDLLEFSCHSGHRVGPDSVQCYHFGWSPGFPTCKGQVASCAPPLEILNGEINGAKKVEYSHGEVVKYDCKPRFLLKGPNKIQCVDGNWTTLPVCIEEERTCGDIPELEHGSAKCSVPPYHHGDSVEFICEENFTMIGHGSVSCISGKWTQLPKCVATDQLEKCRVLKSTGIEAIKPKLTEFTHNSTMDYKCRDKQEYERSICINGKWDPEPNCTSKTSCPPPPQIPNTQVIETTVKYLDGEKLSVLCQDNYLTQDSEEMVCKDGRWQSLPRCIEKIPCSQPPTIEHGSINLPRSSEERRDSIESSSHEHGTTFSYVCDDGFRIPEENRITCYMGKWSTPPRCVGLPCGPPPSIPLGTVSLELESYQHGEEVTYHCSTGFGIDGPAFIICEGGKWSDPPKCIKTDCDVLPTVKNAIIRGKSKKSYRTGEQVTFRCQSPYQMNGSDTVTCVNSRWIGQPVCKDNSCVDPPHVPNATIVTRTKNKYLHGDRVRYECNKPLELFGQVEVMCENGIWTEKPKCRDSTGKCGPPPPIDNGDITSLSLPVYEPLSSVEYQCQKYYLLKGKKTITCRNGKWSEPPTCLHACVIPENIMESHNIILKWRHTEKIYSHSGEDIEFGCKYGYYKARDSPPFRTKCINGTINYPTCV

SEQ ID NO: 265 - protein, 1236 aa, Bos taurus; identical to SEQ ID NO: 263

SEQ ID NO: 266 - protein, 449 aa, Homo sapiens
MRLLAKIICLMLWAICVAEDCNELPPRRNTEILTGSWSDQTYPEGTQAIYKCRPGYRSLGNVIMVCRKGEWVALNPLRKCQKRPCGHPGDTPFGTFTLTGGNVFEYGVKAVYTCNEGYQLLGEINYRECDTDGWTNDIPICEVVKCLPVTAPENGKIVSSAMEPDREYHFGQAVRFVCNSGYKIEGDEEMHCSDDGFWSKEKPKCVEISCKSPDVINGSPISQKIIYKENERFQYKCNMGYEYSERGDAVCTESGWRPLPSCEEKSCDNPYIPNGDYSPLRIKHRTGDEITYQCRNGFYPATRGNTAKCTSTGWIPAPRCTLKPCDYPDIKHGGLYHENMRRPYFPVAVGKYYSYYCDEHFETPSGSYWDHIHCTQDGWSPAVPCLRKCYFPYLENGYNQNYGRKFVQGKSIDVACHPGYALPKAQTTVTCMENGWSPTPRCIRVSFTL

SEQ ID NO: 267 - protein, 781 aa, Xenopus (Silurana) tropicalis; identical to SEQ ID NO: 260

SEQ ID NO: 268 - protein, 449 aa, Homo sapiens; identical to SEQ ID NO: 266

SEQ ID NO: 269 - protein, 385 aa, Homo sapiens
MRLLAKIICLMLWAICVAEDCNELPPRRNTEILTGSWSDQTYPEGTQAIYKCRPGYRSLGNVIMVCRKGEWVALNPLRKCQKRPCGHPGDTPFGTFTLTGGNVFEYGVKAVYTCNEGYQLLGEINYRECDTDGWTNDIPICEEISCKSPDVINGSPISQKIIYKENERFQYKCNMGYEYSERGDAVCTESGWRPLPSCEEKSCDNPYIPNGDYSPLRIKHRTGDEITYQCRNGFYPATRGNTAKCTSTGWIPAPRCTLKPCDYPDIKHGGLYHENMRRPYFPVAVGKYYSYYCDEHFETPSGSYWDHIHCTQDGWSPAVPCLRKCYFPYLENGYNQNHGRKFVQGKSIDVACHPGYALPKAQTTVTCMENGWSPTPRCIRVSFTL

SEQ ID NO: 270 - protein, 1231 aa, Homo sapiens
MRLLAKIICLMLWAICVAEDCNELPPRRNTEILTGSWSDQTYPEGTQAIYKCRPGYRSLGNVIMVCRKGEWVALNPLRKCQKRPCGHPGDTPFGTFTLTGGNVFEYGVKAVYTCNEGYQLLGEINYRECDTDGWTNDIPICEVVKCLPVTAPENGKIVSSAMEPDREYHFGQAVRFVCNSGYKIEGDEEMHCSDDGFWSKEKPKCVEISCKSPDVINGSPISQKIIYKENERFQYKCNMGYEYSERGDAVCTESGWRPLPSCEEKSCDNPYIPNGDYSPLRIKHRTGDEITYQCRNGFYPATRGNTAKCTSTGWIPAPRCTLKPCDYPDIKHGGLYHENMRRPYFPVAVGKYYSYYCDEHFETPSGSYWDHIHCTQDGWSPAVPCLRKCYFPYLENGYNQNHGRKFVQGKSIDVACHPGYALPKAQTTVTCMENGWSPTPRCIRVKTCSKSSIDIENGFISESQYTYALKEKAKYQCKLGYVTADGETSGSITCGKDGWSAQPTCIKSCDIPVFMNARTKNDFTWFKLNDTLDYECHDGYESNTGSTTGSIVCGYNGWSDLPICYERECELPKIDVHLVPDRKKDQYKVGEVLKFSCKPGFTIVGPNSVQCYHFGLSPDLPICKEQVQSCGPPPELLNGNVKEKTKEEYGHSEVVEYYCNPRFLMKGPNKIQCVDGEWTTLPVCIVEESTCGDIPELEHGWAQLSSPPYYYGDSVEFNCSESFTMIGHRSITCIHGVWTQLPQCVAIDKLKKCKSSNLIILEEHLKNKKEFDHNSNIRYRCRGKEGWIHTVCINGRWDPEVNCSMAQIQLCPPPPQIPNSHNMTTTLNYRDGEKVSVLCQENYLIQEGEEITCKDGRWQSIPLCVEKIPCSQPPQIEHGTINSSRSSQESYAHGTKLSYTCEGGFRISEENETTCYMGKWSSPPQCEGLPCKSPPEISHGVVAHMSDSYQYGEEVTYKCFEGFGIDGPAIAKCLGEKWSHPPSCIKTDCLSLPSFENAIPMGEKKDVYKAGEQVTYTCATYYKMDGASNVTCINSRWTGRPTCRDTSCVNPPTVQNAYIVSRQMSKYPSGERVRYQCRSPYEMFGDEEVMCLNGNWTEPPQCKDSTGKCGPPPPIDNGDITSFPLSVYAPASSVEYQCQNLYQLEGNKRITCRNGQWSEPPKCLHPCVISREIMENYNIALRWTAKQKLYSRTGESVEFVCKRGYRLSSRSHTLRTTCWDGKLEYPTCAKR

SEQ ID NO: 271 - protein, 1231 aa, Homo sapiens [sequence omitted]

SEQ ID NO: 272 - protein, 2240 aa, Homo sapiens
MLRGPGPGLLLLAVQCLGTAVPSTGASKSKRQAQQMVQPQSPVAVSQSKPGCYDNGKHYQINQQWERTYLGNALVCTCYGGSRGFNCESKPEAEETCFDKYTGNTYRVGDTYERPKDSMIWDCTCIGAGRGRISCTIANRCHEGGQSYKIGDTWRRPHETGGYMLECVCLGNGKGEWTCKPIAEKCFDHAAGTSYVVGETWEKPYQGWMMVDCTCLGEGSGRITCTSRNRCNDQDTRTSYRIGDTWSKKDNRGNLLQCICTGNGRGEWKCERHTSVQTTSSGSGPFTDVRAAVYQPQPHPQPPPYGHCVTDSGVVYSVGMQWLKTQGNKQMLCTCLGNGVSCQETAVTQTYGGNSNGEPCVLPFTYNGRTFYSCTTEGRQDGHLWCSTTSNYEQDQKYSFCTDHTVLVQTRGGNSNGALCHFPFLYNNHNYTDCTSEGRRDNMKWCGTTQNYDADQKFGFCPMAAHEEICTTNEGVMYRIGDQWDKQHDMGHMMRCTCVGNGRGEWTCIAYSQLRDQCIVDDITYNVNDTFHKRHEEGHMLNCTCFGQGRGRWKCDPVDQCQDSETGTFYQIGDSWEKYVHGVRYQCYCYGRGIGEWHCQPLQTYPSSSGPVEVFITETPSQPNSHPIQWNAPQPSHISKYILRWRPKNSVGRWKEATIPGHLNSYTIKGLKPGVVYEGQLISIQQYGHQEVTRFDFTTTSTSTPVTSNTVTGETTPFSPLVATSESVTEITASSFVVSWVSASDTVSGFRVEYELSEEGDEPQYLDLPSTATSVNIPDLLPGRKYIVNVYQISEDGEQSLILSTSQTTAPDAPPDPTVDQVDDTSIVVRWSRPQAPITGYRIVYSPSVEGSSTELNLPETANSVTLSDLQPGVQYNITIYAVEENQESTPVVIQQETTGTPRSDTVPSPRDLQFVEVTDVKVTIMWTPPESAVTGYRVDVIPVNLPGEHGQRLPISRNTFAEVTGLSPGVTYYFKVFAVSHGRESKPLTAQQTTKLDAPTNLQFVNETDSTVLVRWTPPRAQITGYRLTVGLTRRGQPRQYNVGPSVSKYPLRNLQPASEYTVSLVAIKGNQESPKATGVFTTLQPGSSIPPYNTEVTETTIVITWTPAPRIGFKLGVRPSQGGEAPREVTSDSGSIVVSGLTPGVEYVYTIQVLRDGQERDAPIVNKVVTPLSPPTNLHLEANPDTGVLTVSWERSTTPDITGYRITTTPTNGQQGNSLEEVVHADQSSCTFDNLSPGLEYNVSVYTVKDDKESVPISDTIIPAVPPPTDLRFTNIGPDTMRVTWAPPPSIDLTNFLVRYSPVKNEEDVAELSISPSDNAVVLTNLLPGTEYVVSVSSVYEQHESTPLRGRQKTGLDSPTGIDFSDITANSFTVHWIAPRATITGYRIRHHPEHFSGRPREDRVPHSRNSITLTNLTPGTEYVVSIVALNGREESPLLIGQQSTVSDVPRDLEVVAATPTSLLISWDAPAVTVRYYRITYGETGGNSPVQEFTVPGSKSTATISGLKPGVDYTITVYAVTGRGDSPASSKPISINYRTEIDKPSQMQVTDVQDNSISVKWLPSSSPVTGYRVTTTPKNGPGPTKTKTAGPDQTEMTIEGLQPTVEYVVSVYAQNPSGESQPLVQTAVTTIPAPTDLKFTQVTPTSLSAQWTPPNVQLTGYRVRVTPKEKTGPMKEINLAPDSSSVVVSGLMVATKYEVSVYALKDTLTSRPAQGVVTTLENVSPPRRARVTDATETTITISWRTKTETITGFQVDAVPANGQTPIQRTIKPDVRSYTITGLQPGTDYKIYLYTLNDNARSSPVVIDASTAIDAPSNLRFLATTPNSLLVSWQPPRARITGYIIKYEKPGSPPREVVPRPRPGVTEATITGLEPGTEYTIYVIALKNNQKSEPLIGRKKTVQKTPFVTHPGYDTGNGIQLPGTSGQQPSVGQQMIFEEHGFRRTTPPTTATPIRHRPRPYPPNVGQEALSQTTISWAPFQDTSEYIISCHPVGTDEEPLQFRVPGTSTSATLTGLTRGATYNIIVEALKDQQRHKVREEVVTVGNSVNEGLNQPTDDSCFDPYTVSHYAVGDEWERMSESGFKLLCQCLGFGSGHFRCDSSRWCHDNGVNYKIGEKWDRQGENGQMMSCTCLGNGKGEFKCDPHEATCYDDGKTYHVGEQWQKEYLGAICSCTCFGGQRGWRCDNCRRPGGEPSPEGTTGQSYNQYSQRYHQRTNTNVNCPIECFMPLDVQADREDSRE

SEQ ID NO: 273 - protein, 2176 aa, Mus musculus
MLRGPGPGRLLLLAVLCLGTSVRCTEAGKSKRQAQQIVQPQSPVAVSQSKPGCFDNGKHYQINQQWERTYLGNALVCTCYGGSRGFNCESKPEPEETCFDKYTGNTYKVGDTYERPKDSMIWDCTCIGAGRGRISCTIANRCHEGGQSYKIGDKWRRPHETGGYMLECLCLGNGKGEWTCKPIAEKCFDHAAGTSYVVGETWEKPYQGWMMVDCTCLGEGNGRITCTSRNRCNDQDTRTSYRIGDTWSKKDNRGNLLQCVCTGNGRGEWKCERHALQSASAGSGSFTDVRTAIYQPQTHPQPAPYGHCVTDSGVVYSVGMQWLKSQGNKQMLCTCLGNGVSCQETAVTQTYGGNSNGEPCVLPFTYNGRTFYSCTTEGRQDGHLWCSTTSNYEQDQKYSFCTDHAVLVQTRGGNSNGALCHFPFLYNNRNYTDCTSEGRRDNMKWCGTTQNYDADQKFGFCPMAAHEEICTTNEGVMYRIGDQWDKQHDLGHMMRCTCVGNGRGEWACIPYSQLRDQCIVDDITYNVNDTFHKRHEEGHMLNCTCFGQGRGRWKCDPIDQCQDSETRTFYQIGDSWEKFVHGVRYQCYCYGRGIGEWHCQPLQTYPGTTGPVQVIITETPSQPNSHPIQWNAPEPSHITKYILRWRPKTSTGRWKEATIPGHLNSYTIKGLTPGVIYEGQLISIQQYGHREVTRFDFTTSASTPVTSNTVTGETAPYSPVVATSESVTEITASSFVVSWVSASDTVSGFRVEYELSEEGDEPQYLDLPSTATSVNIPDLLPGRKYIVNVYQISEEGKQSLILSTSQTTAPDAPPDPTVDQVDDTSIVVRWSRPQAPITGYRIVYSPSVEGSSTELNLPETANSVTLSDLQPGVQYNITIYAVEENQESTPVFIQQETTGTPRSDNVPPPTDLQFVELTDVKVTIMWTPPDSVVSGYRVEVLPVSLPGEHGQRLPVNRNTFAEITGLSPGVTYLFKVFAVHQGRESNPLTAQQTTKLDAPTNLQFVNETDRTVLVTWTPPRARIAGYRLTAGLTRGGQPKQYNVGPLASKYPLRNLQPGSEYTVTLVAVKGNQQSPKATGVFTTLQPLRSIPPYNTEVTETTIVITWTPAPRIGFKLGVRPSQGGEAPREVTSDSGSIVVSGLTPGVEYTYTIQVLRDGQERDAPIVNRVVTPLSPPTNLHLEANPDTGVLTVSWERSTTPDITGYRITTTPTNGQQGTSLEEVVHADQSSCTFENLNPGLEYNVSVYTVKDDKESAPISDTVVPAVPPPTDLRFTNIGPDTMRVTWAPPPSIELTNLLVRYSPVKNEEDVAELSISPSDNAVVLTNLLPGTEYLVSVSSVYEQHESIPLRGRQKTGLDSPTGFDSSDITANSFTVHWVAPRAPITGYIIRHHAEHSVGRPRQDRVPPSRNSITLTNLNPGTEYVVSIIAVNGREESPPLIGQQATVSDIPRDLEVIASTPTSLLISWEPPAVSVRYYRITYGETGGNSPVQEFTVPGSKSTATINNIKPGADYTITLYAVTGRGDSPASSKPVSINYKTEIDKPSQMQVTDVQDNSISVRWLPSTSPVTGYRVTTTPKNGLGPSKTKTASPDQTEMTIEGLQPTVEYVVSVYAQNRNGESQPLVQTAVTTIPAPTNLKFSQVTPTSFTAQWIAPSVQLTGYRVRVNPKEKTGPMKEINLSPDSSSVIVSGLMVATKYEVSVYALKDTLTSRPAQGVITTLENVSPPRRARVTDATETTITISWRTKTETITGFQVDAIPANGQTPVQRSISPDVRSYTITGLQPGTDYKIHLYTLNDNARSSPVIIDASTAIDAPSNLRFLTTTPNSLLVSWQAPRARITGYIIKYEKPGSPPREVVPRPRPGVTEATITGLEPGTEYTIYVIALKNNQKSEPLIGRKKTGQEALSQTTISWTPFQESSEYIISCQPVGTDEEPLQFQVPGTSTSATLTGLTRGVTYNIIVEALQNQRRHKVREEVVTVGNAVSEGLNQPTDDSCFDPYTVSHYAIGEEWERLSDAGFKLTCQCLGFGSGHFRCDSSKWCHDNGVNYKIGEKWDRQGENGQRMSCTCLGNGKGEFKCDPHEATCYDDGKTYHVGEQWQKEYLGAICSCTCFGGQRGWRCDNCRRPGAAEPSPDGTTGHTYNQYTQRYNQRTNTNVNCPIECFMPLDVQADRDDSRE

SEQ ID NO: 274 - protein, 2271 aa, Mus musculus
MLRGPGPGRLLLLAVLCLGTSVRCTEAGKSKRQAQQIVQPQSPVAVSQSKPGCFDNGKHYQINQQWERTYLGNALVCTCYGGSRGFNCESKPEPEETCFDKYTGNTYKVGDTYERPKDSMIWDCTCIGAGRGRISCTIANRCHEGGQSYKIGDKWRRPHETGGYMLECLCLGNGKGEWTCKPIAEKCFDHAAGTSYVVGETWEKPYQGWMMVDCTCLGEGNGRITCTSRNRCNDQDTRTSYRIGDTWSKKDNRGNLLQCVCTGNGRGEWKCERHALQSASAGSGSFTDVRTAIYQPQTHPQPAPYGHCVTDSGVVYSVGMQWLKSQGNKQMLCTCLGNGVSCQETAVTQTYGGNSNGEPCVLPFTYNGRTFYSCTTEGRQDGHLWCSTTSNYEQDQKYSFCTDHAVLVQTRGGNSNGALCHFPFLYNNRNYTDCTSEGRRDNMKWCGTTQNYDADQKFGFCPMAAHEEICTTNEGVMYRIGDQWDKQHDLGHMMRCTCVGNGRGEWACIPYSQLRDQCIVDDITYNVNDTFHKRHEEGHMLNCTCFGQGRGRWKCDPIDQCQDSETRTFYQIGDSWEKFVHGVRYQCYCYGRGIGEWHCQPLQTYPGTTGPVQVIITETPSQPNSHPIQWNAPEPSHITKYILRWRPKTSTGRWKEATIPGHLNSYTIKGLTPGVIYEGQLISIQQYGHREVTRFDFTTSASTPVTSNTVTGETAPYSPVVATSESVTEITASSFVVSWVSASDTVSGFRVEYELSEEGDEPQYLDLPSTATSVNIPDLLPGRKYIVNVYQISEEGKQSLILSTSQTTAPDAPPDPTVDQVDDTSIVVRWSRPQAPITGYRIVYSPSVEGSSTELNLPETANSVTLSDLQPGVQYNITIYAVEENQESTPVFIQQETTGTPRSDNVPPPTDLQFVELTDVKVTIMWTPPDSVVSGYRVEVLPVSLPGEHGQRLPVNRNTFAEITGLSPGVTYLFKVFAVHQGRESNPLTAQQTTKLDAPTNLQFVNETDRTVLVTWTPPRARIAGYRLTAGLTRGGQPKQYNVGPLASKYPLRNLQPGSEYTVTLVAVKGNQQSPKATGVFTTLQPLRSIPPYNTEVTETTIVITWTPAPRIGFKLGVRPSQGGEAPREVTSDSGSIVVSGLTPGVEYTYTIQVLRDGQERDAPIVNRVVTPLSPPTNLHLEANPDTGVLTVSWERSTTPDITGYRITTTPTNGQQGTSLEEVVHADQSSCTFENLNPGLEYNVSVYTVKDDKESAPISDTVVPAVPPPTDLRFTNIGPDTMRVTWAPPPSIELTNLLVRYSPVKNEEDVAELSISPSDNAVVLTNLLPGTEYLVSVSSVYEQHESIPLRGRQKTGLDSPTGFDSSDITANSFTVHWVAPRAPITGYIIRHHAEHSVGRPRQDRVPPSRNSITLTNLNPGTEYVVSIIAVNGREESPPLIGQQATVSDIPRDLEVIASTPTSLLISWEPPAVSVRYYRITYGETGGNSPVQEFTVPGSKSTATINNIKPGADYTITLYAVTGRGDSPASSKPVSINYKTEIDKPSQMQVTDVQDNSISVRWLPSTSPVTGYRVTTTPKNGLGPSKTKTASPDQTEMTIEGLQPTVEYVVSVYAQNRNGESQPLVQTAVTTIPAPTNLKFSQVTPTSFTAQWIAPSVQLTGYRVRVNPKEKTGPMKEINLSPDSSSVIVSGLMVATKYEVSVYALKDTLTSRPAQGVITTLENVSPPRRARVTDATETTITISWRTKTETITGFQVDAIPANGQTPVQRSISPDVRSYTITGLQPGTDYKIHLYTLNDNARSSPVIIDASTAIDAPSNLRFLTTTPNSLLVSWQAPRARITGYIIKYEKPGSPPREVVPRPRPGVTEATITGLEPGTEYTIYVIALKNNQKSEPLIGRKKTVQKTPFITNPGYDTENGIQLPGTTHQQPSVGQQMIFEEHGFRRTTPPTAATPVRLRPRPYLPNVDEEVQIGHVPRGDVDYHLYPHVPGLNPNASTGQEALSQTTISWTPFQESSEYIISCQPVGTDEEPLQFQVPGTSTSATLTGLTRGVTYNIIVEALQNQRRHKVREEVVTVGNAVSEGLNQPTDDSCFDPYTVSHYAIGEEWERLSDAGFKLTCQCLGFGSGHFRCDSSKWCHDNGVNYKIGEKWDRQGENGQRMSCTCLGNGKGEFKCDPHEATCYDDGKTYHVGEQWQKEYLGAICSCTCFGGQRGWRCDNCRRPGAAEPSPDGTTGHTYNQYTQRYNQRTNTNVNCPIECFMPLDVQADRDDSRE

SEQ ID NO: 275 - protein, 2480 aa, Danio rerio
MFGGPLGTALAVALLACAVQCMPKGTGKHKRQAQEHSVSSVSQDGCVMDGQFYGAGEQWERIYLGSTLLCTCHGVSKIECKSKPDAEETCYDKVNSRSYRVGETYERPKDGMIWDCTCIGSARGKISCTIANLCHEGGHSYKIGDTWQRPHDTGDYMLECVCLGNGKGEWTCKPVAERCYDNTAGTSYMVGETWEKPYQGWMIVDCTCLGEGSGRITCTSRNRCNDQDTRTSYRIGDTWSKTDSRGHVLQCLCTGNGRGEWKCERHASLHTTSLGTGSRVVTNVQPAVYHPQGVPEHPVEGSCLTEAGVSYAPGMRWSKAQGSKQMLCTCLGNGVSCEESESQSQVYGGTSGGEPCAFPFVFMGKTFYSCTSEGRNDGQLWCSTSSDFEKDYKYSFCTSNNVVVTTRGGNSNGALCQFPFLYNGRNYTDCTADGRRDGMKWCGTTYNFDKEQRFGFCPMAAHEEVCTTNEGVMYRVGDQWDRRHDVLGHMMRCTCVGNGRGEWSCIAYSQLKDQCIVDNLTYEVNQTFTKRHDEGYTMNCTCFGQGRGRWKCDAIDQCQEPETRVFYQIGESWDKLIQGIHYRCYCYGNGIGELSCEPQHSISGGHRPVQVIISEAGNQPNSHPIQWNAPASAHITQYILKWRPKNTHIQWMEVTIPGHVNSYTIAGLKPGVTYEGQLISILRFGRRETTRFDFSTVHGSLETSEGETTQPPRMVDTSESVTEITSSSFVISWVSASDTVSGFRVEYELSEEGGQTGQPMILDLPHSATSVNISELLPGRKYTVNVYEVTGEGEPNLILTTSQTTAPDAPSDHEVEDVADTSIRISWSKPLAPITGYRVVYTPSEEGSSGSVELNLPEHSTSLTLGDLRPGVLYNISIFSVEENQESEPVFVQVTTAGEPLAEEVPSPTDLQFYEVSDSKITITWTSPSSEVSGYRVSVGEVGPDGLIEKEVPYPVTQNAYAEITHLQPGTLYRFFIFSLKSGEESEPLVGEQATKPDPPTDIYFSNITEDSAVIVWLPPTAQITGYRLFLTVEGSNPKQLRIPGRLSQYTLLNLQPDTEYSATLHAERGNVLSEGSIATFATTPPMGNAPYFSTDVTDTSIIVSWSPLPKIGYKLTVRPSQGGEAPRDVTSELGSVLISGLTPGVEYTYSVQPVISGQEHGNPITRRVVTPLSPPTDLNLESNPNTGKLTVQWNDANIPDITGYRVTCTPTKGQQGNSLEEFVKAGQNSCTLENLSPGVEYNVSVFTVKDDMESVPVFTTVTPDVPKITDLSFINVTDSTIGLSWSPLNSTAVTGYRITVLAAGDSVPIFVEFVEPTTGFYTVHGLEPGIDYDITVTTVTENGESEPITITQQTAVPAPYGLSFGEVTADTMLVTWKAPQVPKSSDINQYIIRYHPVDEDDETTERTVEGSENFVVLRHLVPNTEYLVSVICVYEGREGSPAIGTQRTVFDAPVGLQFSDVGTTSFTVRWQAPRAIISGYRIRYQMTSGGRAKEERLPPSRSHFTLTGLTPETEYSISVYAVSGSRDSLPLTGTQSTISDAPTDLEVISSTPTSITVRWDAPSVTVRYYRITHGESGGSDAPLEFMVPGSQSTATIEDLRPGTDYTITVYAVTGRGDSPASSTPIHVKHRTDIDSPSQMEVTDVKDNTITVRWTPAAGPISRYRVNATPLTGEGPVLHAETTSDHTEITFSGLMPAVEYSIKVYALGQDGESLPLVENVVTTVDKPKDLSFTDVESSSMRISWDSPDGVVSSYRVLYYSPEEGERELFPAPHGDDESAVLHGLRPGTEYTVKVIALHDQLPSTALVGTQTTGIPGPTRLQFSQVGPTSFTVSWSSSDASLTGYRVAVSPKSKSGPTKEENITPDSTEFHATGLMPGTDYEVEVYGVKNSLTSPRVKGEITTPDNISPPRRVRISNVKDSSITLTWRSKTEAISGFLVEATPTMGGHNPIQRTIEPDSRTYTIAGLEPGTNYKINIYTLNGNSRSEPFTLTATTAKPVISPPTNLHFTSLASTSISFTWEPPRSTITGYYVTYEEAGGIPKELTPRPQAARTFASISGLIPGTEYIIKIVALNGAQRSTPLIGKARTQLEIEQLPPQLPNPSRPHLEVLDVPEDNDNFNNHVHVLGPNRHNTLGQQGQHIYTEYQSFNLGNNGQQPHHPNHGEPLVYIPLPGADGQRVPVVKVNEGQEAGFPFGGLFNETNLPQESQTQTTIVWQPVPHTSEYVVWCDPITEINEKSFQMRLPGTSTSATLIGLTSGASYNVLVESVNGDQKQKVLEDVVTVGNSVPGAGVIPTGRDVCYDSFTATYHEVNTEWERMSETGFKLWCKCLGLGSGHFRCDSSKWCHDSGHNYRIGEKWDRRAENGHMMSCTCLGNGKGEFKCEPHESTCYDEGKLYQVGNQWQKEYLGAICTCTCYGGQQGWRCENCRRPGAEVDADLIQPPVRTDAFDRYRENALRKLNIQCPIECLRPDLLADAQSPHD

SEQ ID NO: 276 - protein, 268 aa, Homo sapiens
TTISWAPFQDTSEYIISCHPVGTDEEPLQFRVPGTSTSATLTGLTRGATYNIIVEALKDQQRHKVREEVVTVGNSVNEGLNQPTDDSCFDPYTVSHYAVGDEWERMSESGFKLLCQCLGFGSGHFRCDSSRWCHDNGVNYKIGEKWDRQGENGQMMSCTCLGNGKGEFKCDPHEATCYDDGKTYHVGEQWQKEYLGAICSCTCFGGQRGWRCDNCRRPGGEPSPEGTTGQSYNQYSQRYHQRTNTNVNCPIECFMPLDVQADREDSRE

SEQ ID NO: 277 - protein, 383 aa, Mus musculus
MLRGPGPGRLLLLAVLCLGTSVRCTEAGKSKRQAQQIVQPQSPVAVSQSKPGCFDNGKHYQINQQWERTYLGNALVCTCYGGSRGFNCESKPEPEETCFDKYTGNTYKVGDTYERPKDSMIWDCTCIGAGRGRISCTIANRCHEGGQSYKIGDKWRRPHETGGYMLECLCLGNGKGEWTCKPIAEKCFDHAAGTSYVVGETWEKPYQGWMMVDCTCLGEGNGRITCTSRNRCNDQDTRTSYRIGDTWSKKDNRGNLLQCVCTGNGRGEWKCERHALQSASAGSGSFTDVRTAIYQPQTHPQPAPYGHCVTDSGVVYSVGMQWLKSQGNKQMLCTCLGNGVSCQETGRHHLPTDARGPTFSVCSILAVRKKKCKTINPEKFIIL

SEQ ID NO: 278 - protein, 810 aa, Mus musculus
HASDSISVRWLPSTSPVTGYRVTTTPKNGLGPSKTKTASPDQTEMTIEGLQPTVEYVVSVYAQNRNGESQPLVQTAVTNIDRPKGLAFTDVDVDSIKIAWESPQGQVSRYRVTYSSPEDGIRELFPAPDGEDDTAELQGLRPGSEYTVSVVALHDDMESQPLIGIQSTAIPAPTNLKFSQVTPTSFTAQWIAPSVQLTGYRVRVNPKEKTGPMKEINLSPDSSSVIVSGLMVATKYEVSVYALKDTLTSRPAQGVITTLENVSPPRRARVTDATETTITISWRTKTETITGFQVDAIPANGQTPVQRSISPDVRSYTITGLQPGTDYKIHLYTLNDNARSSPVIIDASTAIDAPSNLRFLTTTPNSLLVSWQAPRARITGYIIKYEKPGSPPREVVPRPRPGVTEATITGLEPGTEYTIYVIALKNNQKSEPLIGRKKTVQKTPFITNPGYDTENGIQLPGTTHQQPSVGQQMIFEEHGFRRTTPPTAATPVRLRPRPYLPNVDEEVQIGHVPRGDVDYHLYPHVPGLNPNASTGQEALSQTTISWTPFQESSEYIISCQPVGTDEEPLQFQVPGTSTSATLTGLTRGVTYNIIVEALQNQRRHKVREEVVTVGNAVSEGLNQPTDDSCFDPYTVSHYAIGEEWERLSDAGFKLTCQCLGFGSGHFRCDSSKWCHDNGVNYKIGEKWDRQGENGQRMSCTCLGNGKGEFKCDPHEATCYDDGKTYHVGEQWQKEYLGAICSCTCFGGQRGWRCDNCRRPGAAEPSPDGTTGHTYNQYTQRYNQRTNTNVNCPIECFMPLDVQADRDDSRE

SEQ ID NO: 279 - protein, 216 aa, Mus musculus
VEALQNQRRHKVREEVVTVGNAVSEGLNQPTDDSCFDPYTVSHYAIGEEWERLSDAGFKLTCQCLGFGSGHFRCDSSKWCHDNGVNYKIGEKWDRQGENGQRMSCTCLGNGKGEFKCDPHEATCYDDGKTYHVGEQWQKEYLGAICSCTCFGGQRGWRCDNCRRPGAAEPSPDGTTGHTYNQYTQRYNQRTNTNVNCPIECFMPLDVQADRDDSRE

SEQ ID NO: 280 - protein, 2387 aa, Bos taurus
MLGGPGPGLLLLLAVLSLGTAVPSAGASKSRRQAQQIVQPQSPLTVSQSKPGCYDNGKHYQINQQWERTYLGSALVCTCYGGSRGFNCESKPEPEETCFDKYTGNTYRVGDTYERPKDSMIWDCTCIGAGRGRISCTIANRCHEGGQSYKIGDTWRRPHETGGYMLECVCLGNGKGEWTCKPIAEKCFDQAAGTSYVVGETWEKPYQGWMMVDCTCLGEGSGRITCTSRNRCNDQDTRTSYRIGDTWSKKDNRGNLLQCICTGNGRGEWKCERHTSLQTTSAGSGSFTDVRTAIYQPQPHPQPPPYGHCVTDSGVVYSVGMQWLKTQGNKQMLCTCLGNGVSCQETAVTQTYGGNSNGEPCVLPFTYNGKTFYSCTTEGRQDGHLWCSTTSNYEQDQKYSFCTDHTVLVQTRGGNSNGALCHFPFLYNNHNYTDCTSEGRRDNMKWCGTTQNYDADQKFGFCPMAAHEEICTTNEGVMYRIGDQWDKQHDMGHMMRCTCVGNGRGEWTCVAYSQLRDQCIVDGITYNVNDTFHKRHEEGHMLNCTCFGQGRGRWKCDPVDQCQDSETRTFYQIGDSWEKYLQGVRYQCYCYGRGIGEWACQPLQTYPDTSGPVQVIITETPSQPNSHPIQWSAPESSHISKYILRWKPKNSPNRWKEATIPGHLNSYTIKGLRPGVVYEGQLISVQHYGQREVTRFDFTTTSTSPAVTSNTVTGETTPLSPVVATSESVTEITASSFVVSWVSASDTVSGFRVEYELSEEGDEPQYLDLPSTATSVNIPDLLPGRKYTVNVYEISEEGEQNLILSTSQTTAPDAPPDPTVDQVDDTSIVVRWSRPRAPITGYRIVYSPSVEGSSTELNLPETANSVTLSDLQPGVQYNITIYAVEENQESTPVFIQQETTGVPRSDKVPPPRDLQFVEVTDVKITIMWTPPESPVTGYRVDVIPVNLPGEHGQRLPVSRNTFAEVTGLSPGVTYHFKVFAVNQGRESKPLTAQQATKLDAPTNLQFINETDTTVIVTWTPPRARIVGYRLTVGLTRGGQPKQYNVGPAASQYPLRNLQPGSEYAVSLVAVKGNQQSPRVTGVFTTLQPLGSIPHYNTEVTETTIVITWTPAPRIGFKLGVRPSQGGEAPREVTSESGSIVVSGLTPGVEYVYTISVLRDGQERDAPIVKKVVTPLSPPTNLHLEANPDTGVLTVSWERSTTPDITGYRITTTPTNGQQGYSLEEVVHADQSSCTFENLSPGLEYNVSVYTVKDDKESVPISDTIIPAVPPPTDLRFTNVGPDTMRVTWAPPSSIELTNLLVRYSPVKNEEDVAELSISPSDNAVVLTNLLPGTEYLVSVSSVYEQHESIPLRGRQKTALDSPSGIDFSDITANSFTVHWIAPRATITGYRIRHHPENMGGRPREDRVPPSRNSITLTNLNPGTEYVVSIVALNSKEESLPLVGQQSTVSDVPRDLEVIAATPTSLLISWDAPAVTVRYYRITYGETGGSSPVQEFTVPGSKSTATISGLKPGVDYTITVYAVTGRGDSPASSKPVSINYRTEIDKPSQMQVTDVQDNSISVRWLPSSSPVTGYRVTTAPKNGPGPSKTKTVGPDQTEMTIEGLQPTVEYVVSVYAQNQNGESQPLVQTAVTNIDRPKGLAFTDVDVDSIKIAWESPQGQVSRYRVTYSSPEDGIHELFPAPDGEEETAELQGLRPGSEYTVSVVALHDDMESQPLIGTQSTAIPAPTNLKFTQVTPTSLTAQWTAPNVQLTGYRVRVTPKEKTGPMKEINLAPDSSSVVVSGLMVATKYEVSVYALKDTLTSRPAQGVVTTLENVSPPRRARVTDATETTITISWRTKTETITGFQVDAIPANGQTPIQRTIRPDVRSYTITGLQPGTDYKIHLYTLNDNARSSPVVIDASTAIDAPSNLRFLATTPNSLLVSWQPPRARITGYIIKYEKPGSPPREVVPRPRPGVTEATITGLEPGTEYTIQVIALKNNQKSEPLIGRKKTDELPQLVTLPHPNLHGPEILDVPSTVQKTPFITNPGYDTGNGIQLPGTSGQQPSLGQQMIFEEHGFRRTTPPTTATPVRHRPRPYPPNVNEEIQIGHVPRGDVDHHLYPHVVGLNPNASTGQEALSQTTISWTPFQESSEYIISCHPVGIDEEPLQFRVPGTSASATLTGLTRGATYNIIVEAVKDQQRQKVREEVVTVGNSVDQGLSQPTDDSCFDPYTVSHYAIGEEWERLSDSGFKLSCQCLGFGSGHFRCDSSKWCHDNGVNYKIGEKWDRQGENGQMMSCTCLGNGKGEFKCDPHEATCYDDGKTYHVGEQWQKEYLGAICSCTCFGGQRGWRCDNCRRPGAEPGNEGSTAHSYNQYSQRYHQRTNTNVNCPIECFMPLDVQADREDSRE

SEQ ID NO: 281 - protein, 2176 aa, Homo sapiens [sequence omitted]

SEQ ID NO: 282 - protein, 2330 aa, Homo sapiens
MLRGPGPGLLLLAVQCLGTAVPSTGASKSKRQAQQMVQPQSPVAVSQSKPGCYDNGKHYQINQQWERTYLGNALVCTCYGGSRGFNCESKPEAEETCFDKYTGNTYRVGDTYERPKDSMIWDCTCIGAGRGRISCTIANRCHEGGQSYKIGDTWRRPHETGGYMLECVCLGNGKGEWTCKPIAEKCFDHAAGTSYVVGETWEKPYQGWMMVDCTCLGEGSGRITCTSRNRCNDQDTRTSYRIGDTWSKKDNRGNLLQCICTGNGRGEWKCERHTSVQTTSSGSGPFTDVRAAVYQPQPHPQPPPYGHCVTDSGVVYSVGMQWLKTQGNKQMLCTCLGNGVSCQETAVTQTYGGNSNGEPCVLPFTYNGRTFYSCTTEGRQDGHLWCSTTSNYEQDQKYSFCTDHTVLVQTRGGNSNGALCHFPFLYNNHNYTDCTSEGRRDNMKWCGTTQNYDADQKFGFCPMAAHEEICTTNEGVMYRIGDQWDKQHDMGHMMRCTCVGNGRGEWTCIAYSQLRDQCIVDDITYNVNDTFHKRHEEGHMLNCTCFGQGRGRWKCDPVDQCQDSETGTFYQIGDSWEKYVHGVRYQCYCYGRGIGEWHCQPLQTYPSSSGPVEVFITETPSQPNSHPIQWNAPQPSHISKYILRWRPKNSVGRWKEATIPGHLNSYTIKGLKPGVVYEGQLISIQQYGHQEVTRFDFTTTSTSTPVTSNTVTGETTPFSPLVATSESVTEITASSFVVSWVSASDTVSGFRVEYELSEEGDEPQYLDLPSTATSVNIPDLLPGRKYIVNVYQISEDGEQSLILSTSQTTAPDAPPDPTVDQVDDTSIVVRWSRPQAPITGYRIVYSPSVEGSSTELNLPETANSVTLSDLQPGVQYNITIYAVEENQESTPVVIQQETTGTPRSDTVPSPRDLQFVEVTDVKVTIMWTPPESAVTGYRVDVIPVNLPGEHGQRLPISRNTFAEVTGLSPGVTYYFKVFAVSHGRESKPLTAQQTTKLDAPTNLQFVNETDSTVLVRWTPPRAQITGYRLTVGLTRRGQPRQYNVGPSVSKYPLRNLQPASEYTVSLVAIKGNQESPKATGVFTTLQPGSSIPPYNTEVTETTIVITWTPAPRIGFKLGVRPSQGGEAPREVTSDSGSIVVSGLTPGVEYVYTIQVLRDGQERDAPIVNKVVTPLSPPTNLHLEANPDTGVLTVSWERSTTPDITGYRITTTPTNGQQGNSLEEVVHADQSSCTFDNLSPGLEYNVSVYTVKDDKESVPISDTIIPAVPPPTDLRFTNIGPDTMRVTWAPPPSIDLTNFLVRYSPVKNEEDVAELSISPSDNAVVLTNLLPGTEYVVSVSSVYEQHESTPLRGRQKTGLDSPTGIDFSDITANSFTVHWIAPRATITGYRIRHHPEHFSGRPREDRVPHSRNSITLTNLTPGTEYVVSIVALNGREESPLLIGQQSTVSDVPRDLEVVAATPTSLLISWDAPAVTVRYYRITYGETGGNSPVQEFTVPGSKSTATISGLKPGVDYTITVYAVTGRGDSPASSKPISINYRTEIDKPSQMQVTDVQDNSISVKWLPSSSPVTGYRVTTTPKNGPGPTKTKTAGPDQTEMTIEGLQPTVEYVVSVYAQNPSGESQPLVQTAVTNIDRPKGLAFTDVDVDSIKIAWESPQGQVSRYRVTYSSPEDGIHELFPAPDGEEDTAELQGLRPGSEYTVSVVALHDDMESQPLIGTQSTAIPAPTDLKFTQVTPTSLSAQWTPPNVQLTGYRVRVTPKEKTGPMKEINLAPDSSSVVVSGLMVATKYEVSVYALKDTLTSRPAQGVVTTLENVSPPRRARVTDATETTITISWRTKTETITGFQVDAVPANGQTPIQRTIKPDVRSYTITGLQPGTDYKIYLYTLNDNARSSPVVIDASTAIDAPSNLRFLATTPNSLLVSWQPPRARITGYIIKYEKPGSPPREVVPRPRPGVTEATITGLEPGTEYTIYVIALKNNQKSEPLIGRKKTVQKTPFVTHPGYDTGNGIQLPGTSGQQPSVGQQMIFEEHGFRRTTPPTTATPIRHRPRPYPPNVGQEALSQTTISWAPFQDTSEYIISCHPVGTDEEPLQFRVPGTSTSATLTGLTRGATYNIIVEALKDQQRHKVREEVVTVGNSVNEGLNQPTDDSCFDPYTVSHYAVGDEWERMSESGFKLLCQCLGFGSGHFRCDSSRWCHDNGVNYKIGEKWDRQGENGQMMSCTCLGNGKGEFKCDPHEATCYDDGKTYHVGEQWQKEYLGAICSCTCFGGQRGWRCDNCRRPGGEPSPEGTTGQSYNQYSQRYHQRTNTNVNCPIECFMPLDVQADREDSRE

SEQ ID NO: 283 - protein, 2296 aa, Homo sapiens
MLRGPGPGLLLLAVQCLGTAVPSTGASKSKRQAQQMVQPQSPVAVSQSKPGCYDNGKHYQINQQWERTYLGNALVCTCYGGSRGFNCESKPEAEETCFDKYTGNTYRVGDTYERPKDSMIWDCTCIGAGRGRISCTIANRCHEGGQSYKIGDTWRRPHETGGYMLECVCLGNGKGEWTCKPIAEKCFDHAAGTSYVVGETWEKPYQGWMMVDCTCLGEGSGRITCTSRNRCNDQDTRTSYRIGDTWSKKDNRGNLLQCICTGNGRGEWKCERHTSVQTTSSGSGPFTDVRAAVYQPQPHPQPPPYGHCVTDSGVVYSVGMQWLKTQGNKQMLCTCLGNGVSCQETAVTQTYGGNSNGEPCVLPFTYNGRTFYSCTTEGRQDGHLWCSTTSNYEQDQKYSFCTDHTVLVQTRGGNSNGALCHFPFLYNNHNYTDCTSEGRRDNMKWCGTTQNYDADQKFGFCPMAAHEEICTTNEGVMYRIGDQWDKQHDMGHMMRCTCVGNGRGEWTCIAYSQLRDQCIVDDITYNVNDTFHKRHEEGHMLNCTCFGQGRGRWKCDPVDQCQDSETGTFYQIGDSWEKYVHGVRYQCYCYGRGIGEWHCQPLQTYPSSSGPVEVFITETPSQPNSHPIQWNAPQPSHISKYILRWRPKNSVGRWKEATIPGHLNSYTIKGLKPGVVYEGQLISIQQYGHQEVTRFDFTTTSTSTPVTSNTVTGETTPFSPLVATSESVTEITASSFVVSWVSASDTVSGFRVEYELSEEGDEPQYLDLPSTATSVNIPDLLPGRKYIVNVYQISEDGEQSLILSTSQTTAPDAPPDPTVDQVDDTSIVVRWSRPQAPITGYRIVYSPSVEGSSTELNLPETANSVTLSDLQPGVQYNITIYAVEENQESTPVVIQQETTGTPRSDTVPSPRDLQFVEVTDVKVTIMWTPPESAVTGYRVDVIPVNLPGEHGQRLPISRNTFAEVTGLSPGVTYYFKVFAVSHGRESKPLTAQQTTKLDAPTNLQFVNETDSTVLVRWTPPRAQITGYRLTVGLTRRGQPRQYNVGPSVSKYPLRNLQPASEYTVSLVAIKGNQESPKATGVFTTLQPGSSIPPYNTEVTETTIVITWTPAPRIGFKLGVRPSQGGEAPREVTSDSGSIVVSGLTPGVEYVYTIQVLRDGQERDAPIVNKVVTPLSPPTNLHLEANPDTGVLTVSWERSTTPDITGYRITTTPTNGQQGNSLEEVVHADQSSCTFDNLSPGLEYNVSVYTVKDDKESVPISDTIIPAVPPPTDLRFTNIGPDTMRVTWAPPPSIDLTNFLVRYSPVKNEEDVAELSISPSDNAVVLTNLLPGTEYVVSVSSVYEQHESTPLRGRQKTGLDSPTGIDFSDITANSFTVHWIAPRATITGYRIRHHPEHFSGRPREDRVPHSRNSITLTNLTPGTEYVVSIVALNGREESPLLIGQQSTVSDVPRDLEVVAATPTSLLISWDAPAVTVRYYRITYGETGGNSPVQEFTVPGSKSTATISGLKPGVDYTITVYAVTGRGDSPASSKPISINYRTEIDKPSQMQVTDVQDNSISVKWLPSSSPVTGYRVTTTPKNGPGPTKTKTAGPDQTEMTIEGLQPTVEYVVSVYAQNPSGESQPLVQTAVTTIPAPTDLKFTQVTPTSLSAQWTPPNVQLTGYRVRVTPKEKTGPMKEINLAPDSSSVVVSGLMVATKYEVSVYALKDTLTSRPAQGVVTTLENVSPPRRARVTDATETTITISWRTKTETITGFQVDAVPANGQTPIQRTIKPDVRSYTITGLQPGTDYKIYLYTLNDNARSSPVVIDASTAIDAPSNLRFLATTPNSLLVSWQPPRARITGYIIKYEKPGSPPREVVPRPRPGVTEATITGLEPGTEYTIYVIALKNNQKSEPLIGRKKTDELPQLVTLPHPNLHGPEILDVPSTVQKTPFVTHPGYDTGNGIQLPGTSGQQPSVGQQMIFEEHGFRRTTPPTTATPIRHRPRPYPPNVGEEIQIGHIPREDVDYHLYPHGPGLNPNASTGQEALSQTTISWAPFQDTSEYIISCHPVGTDEEPLQFRVPGTSTSATLTGLTRGATYNIIVEALKDQQRHKVREEVVTVGNSVNEGLNQPTDDSCFDPYTVSHYAVGDEWERMSESGFKLLCQCLGFGSGHFRCDSSRWCHDNGVNYKIGEKWDRQGENGQMMSCTCLGNGKGEFKCDPHEATCYDDGKTYHVGEQWQKEYLGAICSCTCFGGQRGWRCDNCRRPGGEPSPEGTTGQSYNQYSQRYHQRTNTNVNCPIECFMPLDVQADREDSRE

SEQ ID NO: 284 - protein, 2176 aa, Homo sapiens
MLRGPGPGLLLLAVQCLGTAVPSTGASKSKRQAQQMVQPQSPVAVSQSKPGCYDNGKHYQINQQWERTYLGNALVCTCYGGSRGFNCESKPEAEETCFDKYTGNTYRVGDTYERPKDSMIWDCTCIGAGRGRISCTIANRCHEGGQSYKIGDTWRRPHETGGYMLECVCLGNGKGEWTCKPIAEKCFDHAAGTSYVVGETWEKPYQGWMMVDCTCLGEGSGRITCTSRNRCNDQDTRTSYRIGDTWSKKDNRGNLLQCICTGNGRGEWKCERHTSVQTTSSGSGPFTDVRAAVYQPQPHPQPPPYGHCVTDSGVVYSVGMQWLKTQGNKQMLCTCLGNGVSCQETAVTQTYGGNSNGEPCVLPFTYNGRTFYSCTTEGRQDGHLWCSTTSNYEQDQKYSFCTDHTVLVQTRGGNSNGALCHFPFLYNNHNYTDCTSEGRRDNMKWCGTTQNYDADQKFGFCPMAAHEEICTTNEGVMYRIGDQWDKQHDMGHMMRCTCVGNGRGEWTCIAYSQLRDQCIVDDITYNVNDTFHKRHEEGHMLNCTCFGQGRGRWKCDPVDQCQDSETGTFYQIGDSWEKYVHGVRYQCYCYGRGIGEWHCQPLQTYPSSSGPVEVFITETPSQPNSHPIQWNAPQPSHISKYILRWRPKNSVGRWKEATIPGHLNSYTIKGLKPGVVYEGQLISIQQYGHQEVTRFDFTTTSTSTPVTSNTVTGETTPFSPLVATSESVTEITASSFVVSWVSASDTVSGFRVEYELSEEGDEPQYLDLPSTATSVNIPDLLPGRKYIVNVYQISEDGEQSLILSTSQTTAPDAPPDPTVDQVDDTSIVVRWSRPQAPITGYRIVYSPSVEGSSTELNLPETANSVTLSDLQPGVQYNITIYAVEENQESTPVVIQQETTGTPRSDTVPSPRDLQFVEVTDVKVTIMWTPPESAVTGYRVDVIPVNLPGEHGQRLPISRNTFAEVTGLSPGVTYYFKVFAVSHGRESKPLTAQQTTKLDAPTNLQFVNETDSTVLVRWTPPRAQITGYRLTVGLTRRGQPRQYNVGPSVSKYPLRNLQPASEYTVSLVAIKGNQESPKATGVFTTLQPGSSIPPYNTEVTETTIVITWTPAPRIGFKLGVRPSQGGEAPREVTSDSGSIVVSGLTPGVEYVYTIQVLRDGQERDAPIVNKVVTPLSPPTNLHLEANPDTGVLTVSWERSTTPDITGYRITTTPTNGQQGNSLEEVVHADQSSCTFDNLSPGLEYNVSVYTVKDDKESVPISDTIIPAVPPPTDLRFTNIGPDTMRVTWAPPPSIDLTNFLVRYSPVKNEEDVAELSISPSDNAVVLTNLLPGTEYVVSVSSVYEQHESTPLRGRQKTGLDSPTGIDFSDITANSFTVHWIAPRATITGYRIRHHPEHFSGRPREDRVPHSRNSITLTNLTPGTEYVVSIVALNGREESPLLIGQQSTVSDVPRDLEVVAATPTSLLISWDAPAVTVRYYRITYGETGGNSPVQEFTVPGSKSTATISGLKPGVDYTITVYAVTGRGDSPASSKPISINYRTEIDKPSQMQVTDVQDNSISVKWLPSSSPVTGYRVTTTPKNGPGPTKTKTAGPDQTEMTIEGLQPTVEYVVSVYAQNPSGESQPLVQTAVTTIPAPTDLKFTQVTPTSLSAQWTPPNVQLTGYRVRVTPKEKTGPMKEINLAPDSSSVVVSGLMVATKYEVSVYALKDTLTSRPAQGVVTTLENVSPPRRARVTDATETTITISWRTKTETITGFQVDAVPANGQTPIQRTIKPDVRSYTITGLQPGTDYKIYLYTLNDNARSSPVVIDASTAIDAPSNLRFLATTPNSLLVSWQPPRARITGYIIKYEKPGSPPREVVPRPRPGVTEATITGLEPGTEYTIYVIALKNNQKSEPLIGRKKTGQEALSQTTISWAPFQDTSEYIISCHPVGTDEEPLQFRVPGTSTSATLTGLTRGATYNIIVEALKDQQRHKVREEVVTVGNSVNEGLNQPTDDSCFDPYTVSHYAVGDEWERMSESGFKLLCQCLGFGSGHFRCDSSRWCHDNGVNYKIGEKWDRQGENGQMMSCTCLGNGKGEFKCDPHEATCYDDGKTYHVGEQWQKEYLGAICSCTCFGGQRGWRCDNCRRPGGEPSPEGTTGQSYNQYSQRYHQRTNTNVNCPIECFMPLDVQADREDSRE

SEQ ID NO: 285 - protein, 2355 aa, Homo sapiens
MLRGPGPGLLLLAVQCLGTAVPSTGASKSKRQAQQMVQPQSPVAVSQSKPGCYDNGKHYQINQQWERTYLGNALVCTCYGGSRGFNCESKPEAEETCFDKYTGNTYRVGDTYERPKDSMIWDCTCIGAGRGRISCTIANRCHEGGQSYKIGDTWRRPHETGGYMLECVCLGNGKGEWTCKPIAEKCFDHAAGTSYVVGETWEKPYQGWMMVDCTCLGEGSGRITCTSRNRCNDQDTRTSYRIGDTWSKKDNRGNLLQCICTGNGRGEWKCERHTSVQTTSSGSGPFTDVRAAVYQPQPHPQPPPYGHCVTDSGVVYSVGMQWLKTQGNKQMLCTCLGNGVSCQETAVTQTYGGNSNGEPCVLPFTYNGRTFYSCTTEGRQDGHLWCSTTSNYEQDQKYSFCTDHTVLVQTRGGNSNGALCHFPFLYNNHNYTDCTSEGRRDNMKWCGTTQNYDADQKFGFCPMAAHEEICTTNEGVMYRIGDQWDKQHDMGHMMRCTCVGNGRGEWTCIAYSQLRDQCIVDDITYNVNDTFHKRHEEGHMLNCTCFGQGRGRWKCDPVDQCQDSETGTFYQIGDSWEKYVHGVRYQCYCYGRGIGEWHCQPLQTYPSSSGPVEVFITETPSQPNSHPIQWNAPQPSHISKYILRWRPKNSVGRWKEATIPGHLNSYTIKGLKPGVVYEGQLISIQQYGHQEVTRFDFTTTSTSTPVTSNTVTGETTPFSPLVATSESVTEITASSFVVSWVSASDTVSGFRVEYELSEEGDEPQYLDLPSTATSVNIPDLLPGRKYIVNVYQISEDGEQSLILSTSQTTAPDAPPDPTVDQVDDTSIVVRWSRPQAPITGYRIVYSPSVEGSSTELNLPETANSVTLSDLQPGVQYNITIYAVEENQESTPVVIQQETTGTPRSDTVPSPRDLQFVEVTDVKVTIMWTPPESAVTGYRVDVIPVNLPGEHGQRLPISRNTFAEVTGLSPGVTYYFKVFAVSHGRESKPLTAQQTTKLDAPTNLQFVNETDSTVLVRWTPPRAQITGYRLTVGLTRRGQPRQYNVGPSVSKYPLRNLQPASEYTVSLVAIKGNQESPKATGVFTTLQPGSSIPPYNTEVTETTIVITWTPAPRIGFKLGVRPSQGGEAPREVTSDSGSIVVSGLTPGVEYVYTIQVLRDGQERDAPIVNKVVTPLSPPTNLHLEANPDTGVLTVSWERSTTPDITGYRITTTPTNGQQGNSLEEVVHADQSSCTFDNLSPGLEYNVSVYTVKDDKESVPISDTIIPAVPPPTDLRFTNIGPDTMRVTWAPPPSIDLTNFLVRYSPVKNEEDVAELSISPSDNAVVLTNLLPGTEYVVSVSSVYEQHESTPLRGRQKTGLDSPTGIDFSDITANSFTVHWIAPRATITGYRIRHHPEHFSGRPREDRVPHSRNSITLTNLTPGTEYVVSIVALNGREESPLLIGQQSTVSDVPRDLEVVAATPTSLLISWDAPAVTVRYYRITYGETGGNSPVQEFTVPGSKSTATISGLKPGVDYTITVYAVTGRGDSPASSKPISINYRTEIDKPSQMQVTDVQDNSISVKWLPSSSPVTGYRVTTTPKNGPGPTKTKTAGPDQTEMTIEGLQPTVEYVVSVYAQNPSGESQPLVQTAVTNIDRPKGLAFTDVDVDSIKIAWESPQGQVSRYRVTYSSPEDGIHELFPAPDGEEDTAELQGLRPGSEYTVSVVALHDDMESQPLIGTQSTAIPAPTDLKFTQVTPTSLSAQWTPPNVQLTGYRVRVTPKEKTGPMKEINLAPDSSSVVVSGLMVATKYEVSVYALKDTLTSRPAQGVVTTLENVSPPRRARVTDATETTITISWRTKTETITGFQVDAVPANGQTPIQRTIKPDVRSYTITGLQPGTDYKIYLYTLNDNARSSPVVIDASTAIDAPSNLRFLATTPNSLLVSWQPPRARITGYIIKYEKPGSPPREVVPRPRPGVTEATITGLEPGTEYTIYVIALKNNQKSEPLIGRKKTDELPQLVTLPHPNLHGPEILDVPSTVQKTPFVTHPGYDTGNGIQLPGTSGQQPSVGQQMIFEEHGFRRTTPPTTATPIRHRPRPYPPNVGQEALSQTTISWAPFQDTSEYIISCHPVGTDEEPLQFRVPGTSTSATLTGLTRGATYNIIVEALKDQQRHKVREEVVTVGNSVNEGLNQPTDDSCFDPYTVSHYAVGDEWERMSESGFKLLCQCLGFGSGHFRCDSSRWCHDNGVNYKIGEKWDRQGENGQMMSCTCLGNGKGEFKCDPHEATCYDDGKTYHVGEQWQKEYLGAICSCTCFGGQRGWRCDNCRRPGGEPSPEGTTGQSYNQYSQRYHQRTNTNVNCPIECFMPLDVQADREDSRE

SEQ ID NO: 286 - protein, 2477 aa, Rattus norvegicus
MLRGPGPGRLLLLAVLCLGTSVRCTETGKSKRQAQQIVQPPSPVAVSQSKPGCFDNGKHYQINQQWERTYLGNALVCTCYGGSRGFNCESKPEPEETCFDKYTGNTYKVGDTYERPKDSMIWDCTCIGAGRGRISCTIANRCHEGGQSYKIGDKWRRPHETGGYMLECLCLGNGKGEWTCKPIAEKCFDHAAGTSYVVGETWEKPYQGWMMVDCTCLGEGNGRITCTSRNRCNDQDTRTSYRIGDTWSKKDNRGNLLQCVCTGNGRGEWKCERHVLQSASAGSGSFTDVRTAIYQPQTHPQPAPYGHCVTDSGVVYSVGMQWLKSQGDKQMLCTCLGNGVSCQETAVTQTYGGNSNGEPCVLPFTYNGRTFYSCTTEGRQDGHLWCSTTSNYEQDQKYSFCTDHAVLVQTRGGNSNGALCHFPFLYNNRNYTDCTSEGRRDNMKWCGTTQNYDADQKFGFCPMAAHEEICTTNEGVMYRIGDQWDKQHDLGHMMRCTCVGNGRGEWACIPYSQLRDQCIVDDITYNVNDTFHKRHEEGHMLNCTCFGQGRGRWKCDPIDQCQDSETRTFYQIGDSWEKFVHGVRYQCYCYGRGIGEWHCQPLQTYPGTTGPVQVIITETPSQPNSHPIQWNAPEPSHITKYILRWRPKTSTGRWKEATIPGHLNSYTIKGLTPGVIYEGQLISIQQYGHQEVTRFDFTTSASTPVTSNTVTGETAPFSPVVATSESVTEITASSFVVSWVSASDTVSGFRVEYELSEEGDEPQYLDLPSTATSVNIPDLLPGRKYIVNVYQISEEGKQSLILSTSQTTAPDAPPDPTVDQVDDTSIVVRWSRPQAPITGYRIVYSPSVEGSSTELNLPETANSVTLSDLQPGVQYNITIYAVEENQESTPVFIQQETTGVPRSDDVPAPKDLQFVEVTDVKVTIMWTPPNSAVTGYRVDVLPVNLPGEHGQRLPVNRNTFAEVTGLSPGVTYLFKVFAVHQGRESKPLTAQQTTKLDAPTNLQFVNETDRTVLVTWTPPRARIAGYRLTVGLTRGGQPKQYNVGPMASKYPLRNLQPGSEYTVTLMAVKGNQQSPKATGVFTTLQPLRSIPPYNTEVTETTIVITWTPAPRIGFKLGVRPSQGGEAPREVTSDSGSIVVSGLTPGVEYTYTIQVLRDGQERDAPIVNRVVTPLSPPTNLHLEANPDTGVLTVSWERSTTPDITGYRITTTPTNGQQGTALEEVVHADQSSCTFENLNPGLEYNVSVYTVKDDKESAPISDTVIPEVPQLTDLSFVDITDSSIGLRWTPLNSSTIIGYRITVVAAGEGIPIFEDFVDSSVGYYTVTGLEPGIDYDISVITLINGGESAPTTLTQQTAVPPPTDLRFTNIGPDTMRVTWAPPPSIELTNLLVRYSPVKNEEDVAELSISPSDNAVVLTNLLPGTEYLVSVSSVYEQHESIPLRGRQKTGLDSPTGFDSSDVTANSFTVHWVAPRAPITGYIIRHHAEHSAGRPRQDRVPPSRNSITLTNLNPGTEYIVTIIAVNGREESPPLIGQQSTVSDVPRDLEVIASTPTSLLISWEPPAVSVRYYRITYGETGGNSPVQEFTVPGSKSTATINNIKPGADYTITLYAVTGRGDSPASSKPVSINYQTEIDKPSQMQVTDVQDNSISVRWLPSTSPVTGYRVTTAPKNGLGPTKSQTVSPDQTEMTIEGLQPTVEYVVSVYAQNRNGESQPLVQTAVTNIDRPKGLAFTDVDVDSIKIAWESPQGQVSRYRVTYSSPEDGIHELFPAPDGDEDTAELHGLRPGSEYTVSVVALHGGMESQPLIGVQSTAIPAPTNLKFTQVSPTTLTAQWTAPSVKLTGYRVRVTPKEKTGPMKEINLSPDSTSVIVSGLMVATKYEVSVYALKDTLTSRPAQGVVTTLENVSPPRRARVTDATETTITISWRTKTETITGFQVDAIPANGQTPVQRTISPDVRSYTITGLQPGTDYKIHLYTLNDNARSSPVVIDASTAIDAPSNLRFLTTTPNSLLVSWQAPRARITGYIIKYEKPGSPPREVVPRPRPGVTEATITGLEPGTEYTIYVIALKNNQKSEPLIGRKKTDELPQLVTLPHPNLHGPEILDVPSTVQKTPFVTNPGYDTENGIQLPGTSHQQPSVGQQMIFEEHGFRRTTPPTAATPVRLRPRPYLPNVDEEVQIGHVPRGDVDYHLYPHVPGLNPNASTGQEALSQTTISWTPFQESSEYIISCQPVGTDEEPLQFQVPGTSTSATLTGLTRGVTYNIIVEALHNQRRHKVREEVVTVGNTVNEGLNQPTDDSCFDPYTVSHYAVGEEWERLSDSGFKLTCQCLGFGSGHFRCDSSKWCHDNGVNYKIGEKWDRQGENGQRMSCTCLGNGKGEFKCDPHEATCYDDGKTYHVGEQWQKEYLGAICSCTCFGGQRGWRCDNCRRPGAAEPSPDGTTGHTYNQYTQRYHQRTNTNVNCPIECFMPLDVQADRDDSRE

SEQ ID NO: 287 - protein, 2265 aa, Homo sapiens
MLRGPGPGLLLLAVQCLGTAVPSTGASKSKRQAQQMVQPQSPVAVSQSKPGCYDNGKHYQINQQWERTYLGNALVCTCYGGSRGFNCESKPEAEETCFDKYTGNTYRVGDTYERPKDSMIWDCTCIGAGRGRISCTIANRCHEGGQSYKIGDTWRRPHETGGYMLECVCLGNGKGEWTCKPIAEKCFDHAAGTSYVVGETWEKPYQGWMMVDCTCLGEGSGRITCTSRNRCNDQDTRTSYRIGDTWSKKDNRGNLLQCICTGNGRGEWKCERHTSVQTTSSGSGPFTDVRAAVYQPQPHPQPPPYGHCVTDSGVVYSVGMQWLKTQGNKQMLCTCLGNGVSCQETAVTQTYGGNSNGEPCVLPFTYNGRTFYSCTTEGRQDGHLWCSTTSNYEQDQKYSFCTDHTVLVQTRGGNSNGALCHFPFLYNNHNYTDCTSEGRRDNMKWCGTTQNYDADQKFGFCPMAAHEEICTTNEGVMYRIGDQWDKQHDMGHMMRCTCVGNGRGEWTCIAYSQLRDQCIVDDITYNVNDTFHKRHEEGHMLNCTCFGQGRGRWKCDPVDQCQDSETGTFYQIGDSWEKYVHGVRYQCYCYGRGIGEWHCQPLQTYPSSSGPVEVFITETPSQPNSHPIQWNAPQPSHISKYILRWRPKNSVGRWKEATIPGHLNSYTIKGLKPGVVYEGQLISIQQYGHQEVTRFDFTTTSTSTPVTSNTVTGETTPFSPLVATSESVTEITASSFVVSWVSASDTVSGFRVEYELSEEGDEPQYLDLPSTATSVNIPDLLPGRKYIVNVYQISEDGEQSLILSTSQTTAPDAPPDPTVDQVDDTSIVVRWSRPQAPITGYRIVYSPSVEGSSTELNLPETANSVTLSDLQPGVQYNITIYAVEENQESTPVVIQQETTGTPRSDTVPSPRDLQFVEVTDVKVTIMWTPPESAVTGYRVDVIPVNLPGEHGQRLPISRNTFAEVTGLSPGVTYYFKVFAVSHGRESKPLTAQQTTKLDAPTNLQFVNETDSTVLVRWTPPRAQITGYRLTVGLTRRGQPRQYNVGPSVSKYPLRNLQPASEYTVSLVAIKGNQESPKATGVFTTLQPGSSIPPYNTEVTETTIVITWTPAPRIGFKLGVRPSQGGEAPREVTSDSGSIVVSGLTPGVEYVYTIQVLRDGQERDAPIVNKVVTPLSPPTNLHLEANPDTGVLTVSWERSTTPDITGYRITTTPTNGQQGNSLEEVVHADQSSCTFDNLSPGLEYNVSVYTVKDDKESVPISDTIIPAVPPPTDLRFTNIGPDTMRVTWAPPPSIDLTNFLVRYSPVKNEEDVAELSISPSDNAVVLTNLLPGTEYVVSVSSVYEQHESTPLRGRQKTGLDSPTGIDFSDITANSFTVHWIAPRATITGYRIRHHPEHFSGRPREDRVPHSRNSITLTNLTPGTEYVVSIVALNGREESPLLIGQQSTVSDVPRDLEVVAATPTSLLISWDAPAVTVRYYRITYGETGGNSPVQEFTVPGSKSTATISGLKPGVDYTITVYAVTGRGDSPASSKPISINYRTEIDKPSQMQVTDVQDNSISVKWLPSSSPVTGYRVTTTPKNGPGPTKTKTAGPDQTEMTIEGLQPTVEYVVSVYAQNPSGESQPLVQTAVTTIPAPTDLKFTQVTPTSLSAQWTPPNVQLTGYRVRVTPKEKTGPMKEINLAPDSSSVVVSGLMVATKYEVSVYALKDTLTSRPAQGVVTTLENVSPPRRARVTDATETTITISWRTKTETITGFQVDAVPANGQTPIQRTIKPDVRSYTITGLQPGTDYKIYLYTLNDNARSSPVVIDASTAIDAPSNLRFLATTPNSLLVSWQPPRARITGYIIKYEKPGSPPREVVPRPRPGVTEATITGLEPGTEYTIYVIALKNNQKSEPLIGRKKTDELPQLVTLPHPNLHGPEILDVPSTVQKTPFVTHPGYDTGNGIQLPGTSGQQPSVGQQMIFEEHGFRRTTPPTTATPIRHRPRPYPPNVGQEALSQTTISWAPFQDTSEYIISCHPVGTDEEPLQFRVPGTSTSATLTGLTRGATYNIIVEALKDQQRHKVREEVVTVGNSVNEGLNQPTDDSCFDPYTVSHYAVGDEWERMSESGFKLLCQCLGFGSGHFRCDSSRWCHDNGVNYKIGEKWDRQGENGQMMSCTCLGNGKGEFKCDPHEATCYDDGKTYHVGEQWQKEYLGAICSCTCFGGQRGWRCDNCRRPGGEPSPEGTTGQSYNQYSQRYHQRTNTNVNCPIECFMPLDVQADREDSRE

SEQ ID NO: 288 - protein, 2176 aa, Homo sapiens [sequence omitted]

SEQ ID NO: 289 - protein, 2475 aa, Xenopus (Silurana) tropicalis
MRWGALTGLLLALCLCAVVRSAPSSKKRRQAQQQQVVQPHGSPDSQQKGCYDNGKYYQINQQWERTYLGNTLVCTCYGGGRGFNCESKPESEETCFDKYTGVTYRVGETYERPKDNMIWDCTCIGAGRGRISCTIANRCHEGGQSYKIGDTWRRPHETGGYMLECVCLGNGKGEWTCKPVAERCYDNTAGISYVVGQTWEKPYQGWMMVDCTCLGEGSGRITCSSKNRCNDQDTRTSYRIGNSWSKTDTRGNLLQCICTGNGRGEWKCDRHSSAQATGTGSNPITNIQTTLFQPDSELEPYGHCVTDNGVLYSLGMRWLKAQGSKQMLCTCLGNGVSCEETVETITFGGNANGEPCAIPFTHDGKTYYSCTGEGRQDGKLWCATTSNYDTDKKYSFCNEQRALVQTRGGNSNGALCNFPFLYNNRNYTDCTSEGRRDSMKWCGTTANYDADQKFGFCPMAAHEEICTTNEGVMYRVGDQWDKQHDQGHMMRCTCVGNGRGEWTCVAYSQLKDQCIVDGITYDVNSSFTKRHEEGHMMNCTCYGQGRGRWKCDAIDQCQDTETRQFYQIGDSWEKHLQGVRYQCYCYGKGIGEWHCQPLSTSPAGTGPVQVIITESSNFPNSHPIQWNAPQPSHIKNYILRWKPKLKTGPWKQATIPGHLNSYTISGLKPGILYEGQLISILQYGNREVTTFDFTTTSTIHRSSQTETGETTPLPPLVATSESVTEITASSFLVSWVSASDTVSGFRVEYELSEDGDEKRYLELPNTATSVSIPDLLPGRRYNVNVYQITEEGEKSLILSTTQTTAPDAPPDHNVENVDDTSILIKWTKPQAPVTGYRVVYSPSVEGSSTELNLPSTATSVSLTELLPGIEYNITIYAVEDSLESVPIFIQQGTTGTPQTVIVPSPTDLQLVEVTDIKITIMWNPPQSEVSGYRVVVKPVSPSDRDVQNLPVSRNTFAEVVNLHPGRTYTFEVYAVNRGQESEPLAGDFTTKLDAPSDLQFTDVTDSTVVIIWRPPQAKIGRYLLSVGQTRGGQPSQFHINPSATNHKLESLSPGTEYTISLVALKGNQQSASTTGVFSTLEPVGSIPPYNTEVTETTIVVTWTPVPRIGFKLDVRPSQGGEAPREVISESGSIVISGLTPGVEYMYSISVLKDGVERDIPITKTVVTPVAPPTNLRLQPSRDSATLTVYWDSSISPGITGYRITTAPTPMQVGNSLEEEVGPTQTYCLFENLSPGVEYNVSVYAVKGEEESSPLSQIFLQEIPQLTDLKYDDVTDTSIDLRWTPLNSSTIIGYRITVVAAGESVPIYEEFVGPTDGYYKVSGLEPGIDYEISVITLISGGESAPTTIVQHTAVPPPTNLRFTNVGPDTMRVTWSPPTSIELSSFLVRYSPVKKPDDVTELSLSPSTNMVVLSNLLPFTEYLVSVHSVYEERESSALNGVAKTYLDSPTGIDFSEITPNSFTVHWIAPRAPITGYRIRYQLESGAGRPKEERVPPSRNSITLTHLIPGSEYIVSIIAFNGQQESLPLSGQQATVSDVPTDLEVTSSSPNTLTISWEAPSVNVRYYRITHSQTGGHGPEKEFTVPGTSNTATIRGLNPGVSYTITVYAVTGRGDSPASSKPLTIVHMTDVDQPTDMAVTDIQDHSIHVKWSPPPGPVTGYRVTSVPKSGQGETFSQVVSPDQTEVTIVGLQPAVEYVVSIYSQGENGESEPLVETAVTNIDHPKGLTFTDVGVDSIRLAWEVPDGQVTRYRVTYSSPEEGVKELFPAPEGDDDTAELHGLRPGTEYTVSIVALHDDMESKPMIGIQSTAIPAPTNLQFSQVTPSGFSLSWHAPTIHLSGYLVRVNPKEKTGPMKEVRLSPGVTATTVTGLMVATKYEVNVYALKDTLTSQPLQGLISTLDNVSPPRRPRVQDVTETTVTLSWRTKTETITGFQIDAIPAGGQNPIRRTVDADLRSFTITGLQPGTDYKIYLYTLNDNARSSPVIVDVTTAVDSPSNLRFLTTTSNSLLFTWQPPRARITGYIIRYEKAGGLLKEHLPRLQAGTTESTITNLEPGTEYIVYIIAVRNNQKSEPLVGRKRTDELPRLVTLPHPGKGPEILDVPTDEENTPHITQIKLDNGNGIQLPGSNGQQPSSGNEGQLIEEHGFRSPLAPTTAVPVRPGKFTPGHYPQERVDIELDTEFPVQRGDLDGPYPHGLGPQLNDSGVQEVASHTTISWRPELETTEYIISCHPIEHDEAPLQFRVPGTSSSATLNGLTQGATYNIIVEAQKGSDKHKVFEKRVTVGSPGSPEGVLQPAEDTCYDTFNGAHYSVGQEWERMSESGFRLWCKCLGYGSGHFRCDSSKWCHDNGVNHRVGEKWDRRGENGQMMSCTCLGNGKGEFKCEPHEATCYDEGKMYNVGEQWQKEYLGAICSCTCYGGQQGWRCDNCRRPGAVLPDGTAGHTVSQFAQRYQQNYNLNCPIECYLPLQADIQHSEQTQK

SEQ ID NO: 290 - protein, 2421 aa, Homo sapiens [sequence omitted]

SEQ ID NO: 291 - protein, 2355 aa, Homo sapiens [sequence omitted]

SEQ ID NO: 292 - protein, 2355 aa, Homo sapiens [sequence omitted]

SEQ ID NO: 293 - protein, 2296 aa, Homo sapiens [sequence omitted]

SEQ ID NO: 294 - protein, 2446 aa, Homo sapiens [sequence omitted]

SEQ ID NO: 295 - protein, 2477 aa, Homo sapiens [sequence omitted]

SEQ ID NO: 296 - protein, 2386 aa, Homo sapiens [sequence omitted]

SEQ ID NO: 297 - protein, 2330 aa, Homo sapiens [sequence omitted]

SEQ ID NO: 298 - protein, 2176 aa, Homo sapiens [sequence omitted]

SEQ ID NO: 299 - protein, 2475 aa, Xenopus (Silurana) tropicalis; identical to SEQ ID NO: 289

SEQ ID NO: 300 - protein, 2296 aa, Rattus norvegicus
MLRGPGPGRLLLLAVLCLGTSVRCTETGKSKRQAQQIVQPPSPVAVSQSKPGCFDNGKHYQINQQWERTYLGNALVCTCYGGSRGFNCESKPEPEETCFDKYTGNTYKVGDTYERPKDSMIWDCTCIGAGRGRISCTIANRCHEGGQSYKIGDKWRRPHETGGYMLECLCLGNGKGEWTCKPIAEKCFDHAAGTSYVVGETWEKPYQGWMMVDCTCLGEGNGRITCTSRNRCNDQDTRTSYRIGDTWSKKDNRGNLLQCVCTGNGRGEWKCERHVLQSASAGSGSFTDVRTAIYQPQTHPQPAPYGHCVTDSGVVYSVGMQWLKSQGDKQMLCTCLGNGVSCQETAVTQTYGGNSNGEPCVLPFTYNGRTFYSCTTEGRQDGHLWCSTTSNYEQDQKYSFCTDHAVLVQTRGGNSNGALCHFPFLYNNRNYTDCTSEGRRDNMKWCGTTQNYDADQKFGFCPMAAHEEICTTNEGVMYRIGDQWDKQHDLGHMMRCTCVGNGRGEWACIPYSQLRDQCIVDDITYNVNDTFHKRHEEGHMLNCTCFGQGRGRWKCDPIDQCQDSETRTFYQIGDSWEKFVHGVRYQCYCYGRGIGEWHCQPLQTYPGTTGPVQVIITETPSQPNSHPIQWNAPEPSHITKYILRWRPKTSTGRWKEATIPGHLNSYTIKGLTPGVIYEGQLISIQQYGHQEVTRFDFTTSASTPVTSNTVTGETAPFSPVVATSESVTEITASSFVVSWVSASDTVSGFRVEYELSEEGDEPQYLDLPSTATSVNIPDLLPGRKYIVNVYQISEEGKQSLILSTSQTTAPDAPPDPTVDQVDDTSIVVRWSRPQAPITGYRIVYSPSVEGSSTELNLPETANSVTLSDLQPGVQYNITIYAVEENQESTPVFIQQETTGVPRSDDVPAPKDLQFVEVTDVKVTIMWTPPNSAVTGYRVDVLPVNLPGEHGQRLPVNRNTFAEVTGLSPGVTYLFKVFAVHQGRESKPLTAQQTTKLDAPTNLQFVNETDRTVLVTWTPPRARIAGYRLTVGLTRGGQPKQYNVGPMASKYPLRNLQPGSEYTVTLMAVKGNQQSPKATGVFTTLQPLRSIPPYNTEVTETTIVITWTPAPRIGFKLGVRPSQGGEAPREVTSDSGSIVVSGLTPGVEYTYTIQVLRDGQERDAPIVNRVVTPLSPPTNLHLEANPDTGVLTVSWERSTTPDITGYRITTTPTNGQQGTALEEVVHADQSSCTFENLNPGLEYNVSVYTVKDDKESAPISDTVIPAVPPPTDLRFTNIGPDTMRVTWAPPPSIELTNLLVRYSPVKNEEDVAELSISPSDNAVVLTNLLPGTEYLVSVSSVYEQHESIPLRGRQKTGLDSPTGFDSSDVTANSFTVHWVAPRAPITGYIIRHHAEHSAGRPRQDRVPPSRNSITLTNLNPGTEYIVTIIAVNGREESPPLIGQQSTVSDVPRDLEVIASTPTSLLISWEPPAVSVRYYRITYGETGGNSPVQEFTVPGSKSTATINNIKPGADYTITLYAVTGRGDSPASSKPVSINYQTEIDKPSQMQVTDVQDNSISVRWLPSTSPVTGYRVTTAPKNGLGPTKSQTVSPDQTEMTIEGLQPTVEYVVSVYAQNRNGESQPLVQTAVTTIPAPTNLKFTQVSPTTLTAQWTAPSVKLTGYRVRVTPKEKTGPMKEINLSPDSTSVIVSGLMVATKYEVSVYALKDTLTSRPAQGVVTTLENVSPPRRARVTDATETTITISWRTKTETITGFQVDAIPANGQTPVQRTISPDVRSYTITGLQPGTDYKIHLYTLNDNARSSPVVIDASTAIDAPSNLRFLTTTPNSLLVSWQAPRARITGYIIKYEKPGSPPREVVPRPRPGVTEATITGLEPGTEYTIYVIALKNNQKSEPLIGRKKTDELPQLVTLPHPNLHGPEILDVPSTVQKTPFVTNPGYDTENGIQLPGTSHQQPSVGQQMIFEEHGFRRTTPPTAATPVRLRPRPYLPNVDEEVQIGHVPRGDVDYHLYPHVPGLNPNASTGQEALSQTTISWTPFQESSEYIISCQPVGTDEEPLQFQVPGTSTSATLTGLTRGVTYNIIVEALHNQRRHKVREEVVTVGNTVNEGLNQPTDDSCFDPYTVSHYAVGEEWERLSDSGFKLTCQCLGFGSGHFRCDSSKWCHDNGVNYKIGEKWDRQGENGQRMSCTCLGNGKGEFKCDPHEATCYDDGKTYHVGEQWQKEYLGAICSCTCFGGQRGWRCDNCRRPGAAEPSPDGTTGHTYNQYTQRYHQRTNTNVNCPIECFMPLDVQADRDDSRE

SEQ ID NO: 301 - protein, 2386 aa, Rattus norvegicus
MLRGPGPGRLLLLAVLCLGTSVRCTETGKSKRQAQQIVQPPSPVAVSQSKPGCFDNGKHYQINQQWERTYLGNALVCTCYGGSRGFNCESKPEPEETCFDKYTGNTYKVGDTYERPKDSMIWDCTCIGAGRGRISCTIANRCHEGGQSYKIGDKWRRPHETGGYMLECLCLGNGKGEWTCKPIAEKCFDHAAGTSYVVGETWEKPYQGWMMVDCTCLGEGNGRITCTSRNRCNDQDTRTSYRIGDTWSKKDNRGNLLQCVCTGNGRGEWKCERHVLQSASAGSGSFTDVRTAIYQPQTHPQPAPYGHCVTDSGVVYSVGMQWLKSQGDKQMLCTCLGNGVSCQETAVTQTYGGNSNGEPCVLPFTYNGRTFYSCTTEGRQDGHLWCSTTSNYEQDQKYSFCTDHAVLVQTRGGNSNGALCHFPFLYNNRNYTDCTSEGRRDNMKWCGTTQNYDADQKFGFCPMAAHEEICTTNEGVMYRIGDQWDKQHDLGHMMRCTCVGNGRGEWACIPYSQLRDQCIVDDITYNVNDTFHKRHEEGHMLNCTCFGQGRGRWKCDPIDQCQDSETRTFYQIGDSWEKFVHGVRYQCYCYGRGIGEWHCQPLQTYPGTTGPVQVIITETPSQPNSHPIQWNAPEPSHITKYILRWRPKTSTGRWKEATIPGHLNSYTIKGLTPGVIYEGQLISIQQYGHQEVTRFDFTTSASTPVTSNTVTGETAPFSPVVATSESVTEITASSFVVSWVSASDTVSGFRVEYELSEEGDEPQYLDLPSTATSVNIPDLLPGRKYIVNVYQISEEGKQSLILSTSQTTAPDAPPDPTVDQVDDTSIVVRWSRPQAPITGYRIVYSPSVEGSSTELNLPETANSVTLSDLQPGVQYNITIYAVEENQESTPVFIQQETTGVPRSDDVPAPKDLQFVEVTDVKVTIMWTPPNSAVTGYRVDVLPVNLPGEHGQRLPVNRNTFAEVTGLSPGVTYLFKVFAVHQGRESKPLTAQQTTKLDAPTNLQFVNETDRTVLVTWTPPRARIAGYRLTVGLTRGGQPKQYNVGPMASKYPLRNLQPGSEYTVTLMAVKGNQQSPKATGVFTTLQPLRSIPPYNTEVTETTIVITWTPAPRIGFKLGVRPSQGGEAPREVTSDSGSIVVSGLTPGVEYTYTIQVLRDGQERDAPIVNRVVTPLSPPTNLHLEANPDTGVLTVSWERSTTPDITGYRITTTPTNGQQGTALEEVVHADQSSCTFENLNPGLEYNVSVYTVKDDKESAPISDTVIPAVPPPTDLRFTNIGPDTMRVTWAPPPSIELTNLLVRYSPVKNEEDVAELSISPSDNAVVLTNLLPGTEYLVSVSSVYEQHESIPLRGRQKTGLDSPTGFDSSDVTANSFTVHWVAPRAPITGYIIRHHAEHSAGRPRQDRVPPSRNSITLTNLNPGTEYIVTIIAVNGREESPPLIGQQSTVSDVPRDLEVIASTPTSLLISWEPPAVSVRYYRITYGETGGNSPVQEFTVPGSKSTATINNIKPGADYTITLYAVTGRGDSPASSKPVSINYQTEIDKPSQMQVTDVQDNSISVRWLPSTSPVTGYRVTTAPKNGLGPTKSQTVSPDQTEMTIEGLQPTVEYVVSVYAQNRNGESQPLVQTAVTNIDRPKGLAFTDVDVDSIKIAWESPQGQVSRYRVTYSSPEDGIHELFPAPDGDEDTAELHGLRPGSEYTVSVVALHGGMESQPLIGVQSTAIPAPTNLKFTQVSPTTLTAQWTAPSVKLTGYRVRVTPKEKTGPMKEINLSPDSTSVIVSGLMVATKYEVSVYALKDTLTSRPAQGVVTTLENVSPPRRARVTDATETTITISWRTKTETITGFQVDAIPANGQTPVQRTISPDVRSYTITGLQPGTDYKIHLYTLNDNARSSPVVIDASTAIDAPSNLRFLTTTPNSLLVSWQAPRARITGYIIKYEKPGSPPREVVPRPRPGVTEATITGLEPGTEYTIYVIALKNNQKSEPLIGRKKTDELPQLVTLPHPNLHGPEILDVPSTVQKTPFVTNPGYDTENGIQLPGTSHQQPSVGQQMIFEEHGFRRTTPPTAATPVRLRPRPYLPNVDEEVQIGHVPRGDVDYHLYPHVPGLNPNASTGQEALSQTTISWTPFQESSEYIISCQPVGTDEEPLQFQVPGTSTSATLTGLTRGVTYNIIVEALHNQRRHKVREEVVTVGNTVNEGLNQPTDDSCFDPYTVSHYAVGEEWERLSDSGFKLTCQCLGFGSGHFRCDSSKWCHDNGVNYKIGEKWDRQGENGQRMSCTCLGNGKGEFKCDPHEATCYDDGKTYHVGEQWQKEYLGAICSCTCFGGQRGWRCDNCRRPGAAEPSPDGTTGHTYNQYTQRYHQRTNTNVNCPIECFMPLDVQADRDDSRE

SEQ ID NO: 302 - protein, 2387 aa, Rattus norvegicus
MLRGPGPGRLLLLAVLCLGTSVRCTETGKSKRQAQQIVQPPSPVAVSQSKPGCFDNGKHYQINQQWERTYLGNALVCTCYGGSRGFNCESKPEPEETCFDKYTGNTYKVGDTYERPKDSMIWDCTCIGAGRGRISCTIANRCHEGGQSYKIGDKWRRPHETGGYMLECLCLGNGKGEWTCKPIAEKCFDHAAGTSYVVGETWEKPYQGWMMVDCTCLGEGNGRITCTSRNRCNDQDTRTSYRIGDTWSKKDNRGNLLQCVCTGNGRGEWKCERHVLQSASAGSGSFTDVRTAIYQPQTHPQPAPYGHCVTDSGVVYSVGMQWLKSQGDKQMLCTCLGNGVSCQETAVTQTYGGNSNGEPCVLPFTYNGRTFYSCTTEGRQDGHLWCSTTSNYEQDQKYSFCTDHAVLVQTRGGNSNGALCHFPFLYNNRNYTDCTSEGRRDNMKWCGTTQNYDADQKFGFCPMAAHEEICTTNEGVMYRIGDQWDKQHDLGHMMRCTCVGNGRGEWACIPYSQLRDQCIVDDITYNVNDTFHKRHEEGHMLNCTCFGQGRGRWKCDPIDQCQDSETRTFYQIGDSWEKFVHGVRYQCYCYGRGIGEWHCQPLQTYPGTTGPVQVIITETPSQPNSHPIQWNAPEPSHITKYILRWRPKTSTGRWKEATIPGHLNSYTIKGLTPGVIYEGQLISIQQYGHQEVTRFDFTTSASTPVTSNTVTGETAPFSPVVATSESVTEITASSFVVSWVSASDTVSGFRVEYELSEEGDEPQYLDLPSTATSVNIPDLLPGRKYIVNVYQISEEGKQSLILSTSQTTAPDAPPDPTVDQVDDTSIVVRWSRPQAPITGYRIVYSPSVEGSSTELNLPETANSVTLSDLQPGVQYNITIYAVEENQESTPVFIQQETTGVPRSDDVPAPKDLQFVEVTDVKVTIMWTPPNSAVTGYRVDVLPVNLPGEHGQRLPVNRNTFAEVTGLSPGVTYLFKVFAVHQGRESKPLTAQQTTKLDAPTNLQFVNETDRTVLVTWTPPRARIAGYRLTVGLTRGGQPKQYNVGPMASKYPLRNLQPGSEYTVTLMAVKGNQQSPKATGVFTTLQPLRSIPPYNTEVTETTIVITWTPAPRIGFKLGVRPSQGGEAPREVTSDSGSIVVSGLTPGVEYTYTIQVLRDGQERDAPIVNRVVTPLSPPTNLHLEANPDTGVLTVSWERSTTPDITGYRITTTPTNGQQGTALEEVVHADQSSCTFENLNPGLEYNVSVYTVKDDKESAPISDTVIPEVPQLTDLSFVDITDSSIGLRWTPLNSSTIIGYRITVVAAGEGIPIFEDFVDSSVGYYTVTGLEPGIDYDISVITLINGGESAPTTLTQQTAVPPPTDLRFTNIGPDTMRVTWAPPPSIELTNLLVRYSPVKNEEDVAELSISPSDNAVVLTNLLPGTEYLVSVSSVYEQHESIPLRGRQKTGLDSPTGFDSSDVTANSFTVHWVAPRAPITGYIIRHHAEHSAGRPRQDRVPPSRNSITLTNLNPGTEYIVTIIAVNGREESPPLIGQQSTVSDVPRDLEVIASTPTSLLISWEPPAVSVRYYRITYGETGGNSPVQEFTVPGSKSTATINNIKPGADYTITLYAVTGRGDSPASSKPVSINYQTEIDKPSQMQVTDVQDNSISVRWLPSTSPVTGYRVTTAPKNGLGPTKSQTVSPDQTEMTIEGLQPTVEYVVSVYAQNRNGESQPLVQTAVTTIPAPTNLKFTQVSPTTLTAQWTAPSVKLTGYRVRVTPKEKTGPMKEINLSPDSTSVIVSGLMVATKYEVSVYALKDTLTSRPAQGVVTTLENVSPPRRARVTDATETTITISWRTKTETITGFQVDAIPANGQTPVQRTISPDVRSYTITGLQPGTDYKIHLYTLNDNARSSPVVIDASTAIDAPSNLRFLTTTPNSLLVSWQAPRARITGYIIKYEKPGSPPREVVPRPRPGVTEATITGLEPGTEYTIYVIALKNNQKSEPLIGRKKTDELPQLVTLPHPNLHGPEILDVPSTVQKTPFVTNPGYDTENGIQLPGTSHQQPSVGQQMIFEEHGFRRTTPPTAATPVRLRPRPYLPNVDEEVQIGHVPRGDVDYHLYPHVPGLNPNASTGQEALSQTTISWTPFQESSEYIISCQPVGTDEEPLQFQVPGTSTSATLTGLTRGVTYNIIVEALHNQRRHKVREEVVTVGNTVNEGLNQPTDDSCFDPYTVSHYAVGEEWERLSDSGFKLTCQCLGFGSGHFRCDSSKWCHDNGVNYKIGEKWDRQGENGQRMSCTCLGNGKGEFKCDPHEATCYDDGKTYHVGEQWQKEYLGAICSCTCFGGQRGWRCDNCRRPGAAEPSPDGTTGHTYNQYTQRYHQRTNTNVNCPIECFMPLDVQADRDDSRE

SEQ ID NO: 303 - protein, 2477 aa, Rattus norvegicus; identical to SEQ ID NO: 286

SEQ ID NO: 304 - protein, 2386 aa, Mus musculus
MLRGPGPGRLLLLAVLCLGTSVRCTEAGKSKRQAQQIVQPQSPVAVSQSKPGCFDNGKHYQINQQWERTYLGNALVCTCYGGSRGFNCESKPEPEETCFDKYTGNTYKVGDTYERPKDSMIWDCTCIGAGRGRISCTIANRCHEGGQSYKIGDKWRRPHETGGYMLECLCLGNGKGEWTCKPIAEKCFDHAAGTSYVVGETWEKPYQGWMMVDCTCLGEGNGRITCTSRNRCNDQDTRTSYRIGDTWSKKDNRGNLLQCVCTGNGRGEWKCERHALQSASAGSGSFTDVRTAIYQPQTHPQPAPYGHCVTDSGVVYSVGMQWLKSQGNKQMLCTCLGNGVSCQETAVTQTYGGNSNGEPCVLPFTYNGRTFYSCTTEGRQDGHLWCSTTSNYEQDQKYSFCTDHAVLVQTRGGNSNGALCHFPFLYNNRNYTDCTSEGRRDNMKWCGTTQNYDADQKFGFCPMAAHEEICTTNEGVMYRIGDQWDKQHDLGHMMRCTCVGNGRGEWACIPYSQLRDQCIVDDITYNVNDTFHKRHEEGHMLNCTCFGQGRGRWKCDPIDQCQDSETRTFYQIGDSWEKFVHGVRYQCYCYGRGIGEWHCQPLQTYPGTTGPVQVIITETPSQPNSHPIQWNAPEPSHITKYILRWRPKTSTGRWKEATIPGHLNSYTIKGLTPGVIYEGQLISIQQYGHREVTRFDFTTSASTPVTSNTVTGETAPYSPVVATSESVTEITASSFVVSWVSASDTVSGFRVEYELSEEGDEPQYLDLPSTATSVNIPDLLPGRKYIVNVYQISEEGKQSLILSTSQTTAPDAPPDPTVDQVDDTSIVVRWSRPQAPITGYRIVYSPSVEGSSTELNLPETANSVTLSDLQPGVQYNITIYAVEENQESTPVFIQQETTGTPRSDNVPPPTDLQFVELTDVKVTIMWTPPDSVVSGYRVEVLPVSLPGEHGQRLPVNRNTFAEITGLSPGVTYLFKVFAVHQGRESNPLTAQQTTKLDAPTNLQFVNETDRTVLVTWTPPRARIAGYRLTAGLTRGGQPKQYNVGPLASKYPLRNLQPGSEYTVTLVAVKGNQQSPKATGVFTTLQPLRSIPPYNTEVTETTIVITWTPAPRIGFKLGVRPSQGGEAPREVTSDSGSIVVSGLTPGVEYTYTIQVLRDGQERDAPIVNRVVTPLSPPTNLHLEANPDTGVLTVSWERSTTPDITGYRITTTPTNGQQGTSLEEVVHADQSSCTFENLNPGLEYNVSVYTVKDDKESAPISDTVVPAVPPPTDLRFTNIGPDTMRVTWAPPPSIELTNLLVRYSPVKNEEDVAELSISPSDNAVVLTNLLPGTEYLVSVSSVYEQHESIPLRGRQKTGLDSPTGFDSSDITANSFTVHWVAPRAPITGYIIRHHAEHSVGRPRQDRVPPSRNSITLTNLNPGTEYVVSIIAVNGREESPPLIGQQATVSDIPRDLEVIASTPTSLLISWEPPAVSVRYYRITYGETGGNSPVQEFTVPGSKSTATINNIKPGADYTITLYAVTGRGDSPASSKPVSINYKTEIDKPSQMQVTDVQDNSISVRWLPSTSPVTGYRVTTTPKNGLGPSKTKTASPDQTEMTIEGLQPTVEYVVSVYAQNRNGESQPLVQTAVTNIDRPKGLAFTDVDVDSIKIAWESPQGQVSRYRVTYSSPEDGIRELFPAPDGEDDTAELQGLRPGSEYTVSVVALHDDMESQPLIGIQSTAIPAPTNLKFSQVTPTSFTAQWIAPSVQLTGYRVRVNPKEKTGPMKEINLSPDSSSVIVSGLMVATKYEVSVYALKDTLTSRPAQGVITTLENVSPPRRARVTDATETTITISWRTKTETITGFQVDAIPANGQTPVQRSISPDVRSYTITGLQPGTDYKIHLYTLNDNARSSPVIIDASTAIDAPSNLRFLTTTPNSLLVSWQAPRARITGYIIKYEKPGSPPREVVPRPRPGVTEATITGLEPGTEYTIYVIALKNNQKSEPLIGRKKTDELPQLVTLPHPNLHGPEILDVPSTVQKTPFITNPGYDTENGIQLPGTTHQQPSVGQQMIFEEHGFRRTTPPTAATPVRLRPRPYLPNVDEEVQIGHVPRGDVDYHLYPHVPGLNPNASTGQEALSQTTISWTPFQESSEYIISCQPVGTDEEPLQFQVPGTSTSATLTGLTRGVTYNIIVEALQNQRRHKVREEVVTVGNAVSEGLNQPTDDSCFDPYTVSHYAIGEEWERLSDAGFKLTCQCLGFGSGHFRCDSSKWCHDNGVNYKIGEKWDRQGENGQRMSCTCLGNGKGEFKCDPHEATCYDDGKTYHVGEQWQKEYLGAICSCTCFGGQRGWRCDNCRRPGAAEPSPDGTTGHTYNQYTQRYNQRTNTNVNCPIECFMPLDVQADRDDSRE

SEQ ID NO: 305 - protein, 2296 aa, Mus musculus
MLRGPGPGRLLLLAVLCLGTSVRCTEAGKSKRQAQQIVQPQSPVAVSQSKPGCFDNGKHYQINQQWERTYLGNALVCTCYGGSRGFNCESKPEPEETCFDKYTGNTYKVGDTYERPKDSMIWDCTCIGAGRGRISCTIANRCHEGGQSYKIGDKWRRPHETGGYMLECLCLGNGKGEWTCKPIAEKCFDHAAGTSYVVGETWEKPYQGWMMVDCTCLGEGNGRITCTSRNRCNDQDTRTSYRIGDTWSKKDNRGNLLQCVCTGNGRGEWKCERHALQSASAGSGSFTDVRTAIYQPQTHPQPAPYGHCVTDSGVVYSVGMQWLKSQGNKQMLCTCLGNGVSCQETAVTQTYGGNSNGEPCVLPFTYNGRTFYSCTTEGRQDGHLWCSTTSNYEQDQKYSFCTDHAVLVQTRGGNSNGALCHFPFLYNNRNYTDCTSEGRRDNMKWCGTTQNYDADQKFGFCPMAAHEEICTTNEGVMYRIGDQWDKQHDLGHMMRCTCVGNGRGEWACIPYSQLRDQCIVDDITYNVNDTFHKRHEEGHMLNCTCFGQGRGRWKCDPIDQCQDSETRTFYQIGDSWEKFVHGVRYQCYCYGRGIGEWHCQPLQTYPGTTGPVQVIITETPSQPNSHPIQWNAPEPSHITKYILRWRPKTSTGRWKEATIPGHLNSYTIKGLTPGVIYEGQLISIQQYGHREVTRFDFTTSASTPVTSNTVTGETAPYSPVVATSESVTEITASSFVVSWVSASDTVSGFRVEYELSEEGDEPQYLDLPSTATSVNIPDLLPGRKYIVNVYQISEEGKQSLILSTSQTTAPDAPPDPTVDQVDDTSIVVRWSRPQAPITGYRIVYSPSVEGSSTELNLPETANSVTLSDLQPGVQYNITIYAVEENQESTPVFIQQETTGTPRSDNVPPPTDLQFVELTDVKVTIMWTPPDSVVSGYRVEVLPVSLPGEHGQRLPVNRNTFAEITGLSPGVTYLFKVFAVHQGRESNPLTAQQTTKLDAPTNLQFVNETDRTVLVTWTPPRARIAGYRLTAGLTRGGQPKQYNVGPLASKYPLRNLQPGSEYTVTLVAVKGNQQSPKATGVFTTLQPLRSIPPYNTEVTETTIVITWTPAPRIGFKLGVRPSQGGEAPREVTSDSGSIVVSGLTPGVEYTYTIQVLRDGQERDAPIVNRVVTPLSPPTNLHLEANPDTGVLTVSWERSTTPDITGYRITTTPTNGQQGTSLEEVVHADQSSCTFENLNPGLEYNVSVYTVKDDKESAPISDTVVPAVPPPTDLRFTNIGPDTMRVTWAPPPSIELTNLLVRYSPVKNEEDVAELSISPSDNAVVLTNLLPGTEYLVSVSSVYEQHESIPLRGRQKTGLDSPTGFDSSDITANSFTVHWVAPRAPITGYIIRHHAEHSVGRPRQDRVPPSRNSITLTNLNPGTEYVVSIIAVNGREESPPLIGQQATVSDIPRDLEVIASTPTSLLISWEPPAVSVRYYRITYGETGGNSPVQEFTVPGSKSTATINNIKPGADYTITLYAVTGRGDSPASSKPVSINYKTEIDKPSQMQVTDVQDNSISVRWLPSTSPVTGYRVTTTPKNGLGPSKTKTASPDQTEMTIEGLQPTVEYVVSVYAQNRNGESQPLVQTAVTTIPAPTNLKFSQVTPTSFTAQWIAPSVQLTGYRVRVNPKEKTGPMKEINLSPDSSSVIVSGLMVATKYEVSVYALKDTLTSRPAQGVITTLENVSPPRRARVTDATETTITISWRTKTETITGFQVDAIPANGQTPVQRSISPDVRSYTITGLQPGTDYKIHLYTLNDNARSSPVIIDASTAIDAPSNLRFLTTTPNSLLVSWQAPRARITGYIIKYEKPGSPPREVVPRPRPGVTEATITGLEPGTEYTIYVIALKNNQKSEPLIGRKKTDELPQLVTLPHPNLHGPEILDVPSTVQKTPFITNPGYDTENGIQLPGTTHQQPSVGQQMIFEEHGFRRTTPPTAATPVRLRPRPYLPNVDEEVQIGHVPRGDVDYHLYPHVPGLNPNASTGQEALSQTTISWTPFQESSEYIISCQPVGTDEEPLQFQVPGTSTSATLTGLTRGVTYNIIVEALQNQRRHKVREEVVTVGNAVSEGLNQPTDDSCFDPYTVSHYAIGEEWERLSDAGFKLTCQCLGFGSGHFRCDSSKWCHDNGVNYKIGEKWDRQGENGQRMSCTCLGNGKGEFKCDPHEATCYDDGKTYHVGEQWQKEYLGAICSCTCFGGQRGWRCDNCRRPGAAEPSPDGTTGHTYNQYTQRYNQRTNTNVNCPIECFMPLDVQADRDDSRE

SEQ ID NO: 306 - protein, 2387 aa, Mus musculus
MLRGPGPGRLLLLAVLCLGTSVRCTEAGKSKRQAQQIVQPQSPVAVSQSKPGCFDNGKHYQINQQWERTYLGNALVCTCYGGSRGFNCESKPEPEETCFDKYTGNTYKVGDTYERPKDSMIWDCTCIGAGRGRISCTIANRCHEGGQSYKIGDKWRRPHETGGYMLECLCLGNGKGEWTCKPIAEKCFDHAAGTSYVVGETWEKPYQGWMMVDCTCLGEGNGRITCTSRNRCNDQDTRTSYRIGDTWSKKDNRGNLLQCVCTGNGRGEWKCERHALQSASAGSGSFTDVRTAIYQPQTHPQPAPYGHCVTDSGVVYSVGMQWLKSQGNKQMLCTCLGNGVSCQETAVTQTYGGNSNGEPCVLPFTYNGRTFYSCTTEGRQDGHLWCSTTSNYEQDQKYSFCTDHAVLVQTRGGNSNGALCHFPFLYNNRNYTDCTSEGRRDNMKWCGTTQNYDADQKFGFCPMAAHEEICTTNEGVMYRIGDQWDKQHDLGHMMRCTCVGNGRGEWACIPYSQLRDQCIVDDITYNVNDTFHKRHEEGHMLNCTCFGQGRGRWKCDPIDQCQDSETRTFYQIGDSWEKFVHGVRYQCYCYGRGIGEWHCQPLQTYPGTTGPVQVIITETPSQPNSHPIQWNAPEPSHITKYILRWRPKTSTGRWKEATIPGHLNSYTIKGLTPGVIYEGQLISIQQYGHREVTRFDFTTSASTPVTSNTVTGETAPYSPVVATSESVTEITASSFVVSWVSASDTVSGFRVEYELSEEGDEPQYLDLPSTATSVNIPDLLPGRKYIVNVYQISEEGKQSLILSTSQTTAPDAPPDPTVDQVDDTSIVVRWSRPQAPITGYRIVYSPSVEGSSTELNLPETANSVTLSDLQPGVQYNITIYAVEENQESTPVFIQQETTGTPRSDNVPPPTDLQFVELTDVKVTIMWTPPDSVVSGYRVEVLPVSLPGEHGQRLPVNRNTFAEITGLSPGVTYLFKVFAVHQGRESNPLTAQQTTKLDAPTNLQFVNETDRTVLVTWTPPRARIAGYRLTAGLTRGGQPKQYNVGPLASKYPLRNLQPGSEYTVTLVAVKGNQQSPKATGVFTTLQPLRSIPPYNTEVTETTIVITWTPAPRIGFKLGVRPSQGGEAPREVTSDSGSIVVSGLTPGVEYTYTIQVLRDGQERDAPIVNRVVTPLSPPTNLHLEANPDTGVLTVSWERSTTPDITGYRITTTPTNGQQGTSLEEVVHADQSSCTFENLNPGLEYNVSVYTVKDDKESAPISDTVVPEVPQLTDLSFVDITDSSIGLRWTPLNSSTIIGYRITVVAAGEGIPIFEDFVDSSVGYYTVTGLEPGIDYDISVITLINGGESAPTTLTQQTAVPPPTDLRFTNIGPDTMRVTWAPPPSIELTNLLVRYSPVKNEEDVAELSISPSDNAVVLTNLLPGTEYLVSVSSVYEQHESIPLRGRQKTGLDSPTGFDSSDITANSFTVHWVAPRAPITGYIIRHHAEHSVGRPRQDRVPPSRNSITLTNLNPGTEYVVSIIAVNGREESPPLIGQQATVSDIPRDLEVIASTPTSLLISWEPPAVSVRYYRITYGETGGNSPVQEFTVPGSKSTATINNIKPGADYTITLYAVTGRGDSPASSKPVSINYKTEIDKPSQMQVTDVQDNSISVRWLPSTSPVTGYRVTTTPKNGLGPSKTKTASPDQTEMTIEGLQPTVEYVVSVYAQNRNGESQPLVQTAVTTIPAPTNLKFSQVTPTSFTAQWIAPSVQLTGYRVRVNPKEKTGPMKEINLSPDSSSVIVSGLMVATKYEVSVYALKDTLTSRPAQGVITTLENVSPPRRARVTDATETTITISWRTKTETITGFQVDAIPANGQTPVQRSISPDVRSYTITGLQPGTDYKIHLYTLNDNARSSPVIIDASTAIDAPSNLRFLTTTPNSLLVSWQAPRARITGYIIKYEKPGSPPREVVPRPRPGVTEATITGLEPGTEYTIYVIALKNNQKSEPLIGRKKTDELPQLVTLPHPNLHGPEILDVPSTVQKTPFITNPGYDTENGIQLPGTTHQQPSVGQQMIFEEHGFRRTTPPTAATPVRLRPRPYLPNVDEEVQIGHVPRGDVDYHLYPHVPGLNPNASTGQEALSQTTISWTPFQESSEYIISCQPVGTDEEPLQFQVPGTSTSATLTGLTRGVTYNIIVEALQNQRRHKVREEVVTVGNAVSEGLNQPTDDSCFDPYTVSHYAIGEEWERLSDAGFKLTCQCLGFGSGHFRCDSSKWCHDNGVNYKIGEKWDRQGENGQRMSCTCLGNGKGEFKCDPHEATCYDDGKTYHVGEQWQKEYLGAICSCTCFGGQRGWRCDNCRRPGAAEPSPDGTTGHTYNQYTQRYNQRTNTNVNCPIECFMPLDVQADRDDSRE

SEQ ID NO: 307 - protein, 2477 aa, Mus musculus
MLRGPGPGRLLLLAVLCLGTSVRCTEAGKSKRQAQQIVQPQSPVAVSQSKPGCFDNGKHYQINQQWERTYLGNALVCTCYGGSRGFNCESKPEPEETCFDKYTGNTYKVGDTYERPKDSMIWDCTCIGAGRGRISCTIANRCHEGGQSYKIGDKWRRPHETGGYMLECLCLGNGKGEWTCKPIAEKCFDHAAGTSYVVGETWEKPYQGWMMVDCTCLGEGNGRITCTSRNRCNDQDTRTSYRIGDTWSKKDNRGNLLQCVCTGNGRGEWKCERHALQSASAGSGSFTDVRTAIYQPQTHPQPAPYGHCVTDSGVVYSVGMQWLKSQGNKQMLCTCLGNGVSCQETAVTQTYGGNSNGEPCVLPFTYNGRTFYSCTTEGRQDGHLWCSTTSNYEQDQKYSFCTDHAVLVQTRGGNSNGALCHFPFLYNNRNYTDCTSEGRRDNMKWCGTTQNYDADQKFGFCPMAAHEEICTTNEGVMYRIGDQWDKQHDLGHMMRCTCVGNGRGEWACIPYSQLRDQCIVDDITYNVNDTFHKRHEEGHMLNCTCFGQGRGRWKCDPIDQCQDSETRTFYQIGDSWEKFVHGVRYQCYCYGRGIGEWHCQPLQTYPGTTGPVQVIITETPSQPNSHPIQWNAPEPSHITKYILRWRPKTSTGRWKEATIPGHLNSYTIKGLTPGVIYEGQLISIQQYGHREVTRFDFTTSASTPVTSNTVTGETAPYSPVVATSESVTEITASSFVVSWVSASDTVSGFRVEYELSEEGDEPQYLDLPSTATSVNIPDLLPGRKYIVNVYQISEEGKQSLILSTSQTTAPDAPPDPTVDQVDDTSIVVRWSRPQAPITGYRIVYSPSVEGSSTELNLPETANSVTLSDLQPGVQYNITIYAVEENQESTPVFIQQETTGTPRSDNVPPPTDLQFVELTDVKVTIMWTPPDSVVSGYRVEVLPVSLPGEHGQRLPVNRNTFAEITGLSPGVTYLFKVFAVHQGRESNPLTAQQTTKLDAPTNLQFVNETDRTVLVTWTPPRARIAGYRLTAGLTRGGQPKQYNVGPLASKYPLRNLQPGSEYTVTLVAVKGNQQSPKATGVFTTLQPLRSIPPYNTEVTETTIVITWTPAPRIGFKLGVRPSQGGEAPREVTSDSGSIVVSGLTPGVEYTYTIQVLRDGQERDAPIVNRVVTPLSPPTNLHLEANPDTGVLTVSWERSTTPDITGYRITTTPTNGQQGTSLEEVVHADQSSCTFENLNPGLEYNVSVYTVKDDKESAPISDTVVPEVPQLTDLSFVDITDSSIGLRWTPLNSSTIIGYRITVVAAGEGIPIFEDFVDSSVGYYTVTGLEPGIDYDISVITLINGGESAPTTLTQQTAVPPPTDLRFTNIGPDTMRVTWAPPPSIELTNLLVRYSPVKNEEDVAELSISPSDNAVVLTNLLPGTEYLVSVSSVYEQHESIPLRGRQKTGLDSPTGFDSSDITANSFTVHWVAPRAPITGYIIRHHAEHSVGRPRQDRVPPSRNSITLTNLNPGTEYVVSIIAVNGREESPPLIGQQATVSDIPRDLEVIASTPTSLLISWEPPAVSVRYYRITYGETGGNSPVQEFTVPGSKSTATINNIKPGADYTITLYAVTGRGDSPASSKPVSINYKTEIDKPSQMQVTDVQDNSISVRWLPSTSPVTGYRVTTTPKNGLGPSKTKTASPDQTEMTIEGLQPTVEYVVSVYAQNRNGESQPLVQTAVTNIDRPKGLAFTDVDVDSIKIAWESPQGQVSRYRVTYSSPEDGIRELFPAPDGEDDTAELQGLRPGSEYTVSVVALHDDMESQPLIGIQSTAIPAPTNLKFSQVTPTSFTAQWIAPSVQLTGYRVRVNPKEKTGPMKEINLSPDSSSVIVSGLMVATKYEVSVYALKDTLTSRPAQGVITTLENVSPPRRARVTDATETTITISWRTKTETITGFQVDAIPANGQTPVQRSISPDVRSYTITGLQPGTDYKIHLYTLNDNARSSPVIIDASTAIDAPSNLRFLTTTPNSLLVSWQAPRARITGYIIKYEKPGSPPREVVPRPRPGVTEATITGLEPGTEYTIYVIALKNNQKSEPLIGRKKTDELPQLVTLPHPNLHGPEILDVPSTVQKTPFITNPGYDTENGIQLPGTTHQQPSVGQQMIFEEHGFRRTTPPTAATPVRLRPRPYLPNVDEEVQIGHVPRGDVDYHLYPHVPGLNPNASTGQEALSQTTISWTPFQESSEYIISCQPVGTDEEPLQFQVPGTSTSATLTGLTRGVTYNIIVEALQNQRRHKVREEVVTVGNAVSEGLNQPTDDSCFDPYTVSHYAIGEEWERLSDAGFKLTCQCLGFGSGHFRCDSSKWCHDNGVNYKIGEKWDRQGENGQRMSCTCLGNGKGEFKCDPHEATCYDDGKTYHVGEQWQKEYLGAICSCTCFGGQRGWRCDNCRRPGAAEPSPDGTTGHTYNQYTQRYNQRTNTNVNCPIECFMPLDVQADRDDSRE

SEQ ID NO: 308 - protein, 2478 aa, Danio rerio
MFGGPLGTALAVALLACAVQCMPKGTGKHKRQAQEHSVSSVSQDGCVMDGQFYGAGEQWERIYLGSTLLCTCHGVSKIECKSKPDAEETCYDKVNSRSYRVGETYERPKDGMIWDCTCIGSARGKISCTIANRCHEGGHSYKIGDTWQRPHDTGDYMLECVCLGNGKGEWTCKPVADACYDNTAGTSYMVGETWEKPYQGWMIVDCTCLGEGSGRITCTSRNRCNDQDTRTSYRIGDTWSKTDSRGHVLQCLCTGNGRGEWKCERHASLHTTSLGTGSRVVTNVQPAVYHPQGVPEHPVEGSCLTEAGVSYAPGMRWSKAQGSKQMLCTCLGNGVSCEESESQSQVYGGTSGGEPCAFPFVFMGETFYSCTSEGRNDGQLWCSTSSDFEKDYKYSFCTSNNVVVTTRGGNSNGALCQFPFLYNGRNYTDCTADGRRDGMKWCGTTYNFDKEQRFGFCPMAAHEEVCTTNEGVMYRVGDQWDRRHDVLGHMMRCTCVGNGRGEWSCIAYSQLKDQCIVDNLTYEVNQTFTKRHDEGYTMNCTCFGQGRGRWKCDAIDQCQEPETRVFYQIGESWDKLIQGIHYRCYCYGNGIGELSCEPQHSISGGHRPVQVIISEAGNQPNSHPIQWNAPASAHITQYILKWRPKNTHIQWMEVTIPGHVNSYTIAGLKPGVTYEGQLISILRFGRRETTRFDFSTVHGSLETSEGETTQPPRMVDTSESVTEITSSSFVISWVSASDTVSGFRVEYELSEEGGQTGQPMILDLPHSATSVNISELLPGRKYTVNVYEVTGEGEPNLILTTSQTTAPDAPSDHEVEDVADTSIRISWSKPLAPITGYRVVYTPSEEGSSGSVELNLPEHSTSLTLGDLRPGVLYNISIFSVEENQESEPVFVQVTTAGEPLAEEVPSPTDLQFYEVSDSKITITWTSPSSEVSGYRVSVGEVGPDGFDEEVLSVTQNAYAEITHLQPGTLYRFFIFSLKSGEESEPLVGEQATKPDPQTDIYFSNITEDSAVIVWLPPTAQITGYRLFLTVEGSNPNSCVFQPSGRSYHPSLNLQPDTEYSATLHAERGNVLSEGSIATFATTPPMGNAPYFSTDVTDTSIIVSWSPLPKIGYKLTVRPSQGGEAPRDVTSELGSVLISGLTPGVEYTYSVQPVISGQEHGNPITRRVVTPLSPPTDLNLESNPNTGKLTVQWNDANIPDITGYRVTCTPTKGQQGNSLEEFVKAGQNSCTLENLSPGVEYNVSVFTVKDDMESVPVFTTVTPDVPKITDLSFINVTDSTIGLSWSPLNSTAVTGYRITVLAAGDSVPIFVEFVEPTTGFYTVHGLEPGIDYDITVTTVTENGESEPITITQQTAVPAPYGLSFGEVTADTMLVTWKAPQVPKSSDINQYIIRYHPVDEDDETTERTVEGSENFVVLRHLVPNTEYLVSVICVYEGREGSPAIGPRELFLMPCCLQFSDVGTTSFTVRWQAPRAIISGYRIRYQMTSGGRAKEERLPPSRSHFTLTGLTPETEYSISVYAVSGSRDSLPLTGTQSTISDAPTDLEVISSTPTSITVRWDAPSVTVRYYRITHGESGGSDAPLEFMVPGSQSTATIEDLRPGTDYTITVYAVTGRGDSPASSTPIHVKHRTDIDSPSQMEVTDVKDNTITVRWTPAAGPISRYRVNATPLTGEGPVLHAETTSDHTEITFSGLMPAVEYSIKVYALGQDGESLPLVENVVTTVDKPKDLSFTDVESSSMRISWDSPDGVVSSYRVLYYSPEEGERELFPAPHGDDESAVLHGLRPGTEYTVKVIALHDQSPSTALVGTQTTGIPGPTRLQFSQVGPTSFTVSWSSSDASLTGYRVAVSPKSKSGPTKEENITPDSTEFHATGLMPGTDYEVEVYGVKNSLTSPRVKGEITTPDNISPPRRVRISNVKDSSITLTWRSKTEAISGFLVEATPTMGGHNPIQRTIEPDSRTYTIAGLEPGTNYKINIYTLNGNSRSEPFTLTATTAKPVISPPTNLHFTSLASTSISFTWEPPRSTITGYYVTYEEAGGIPKELTPRPQAARTFASISGLIPGTEYIIKIVALNGAQRSTPLIGKARTQLEIEQLPPQLPNPSRPHLEVLDVPEDNDNFNNHVHVLGPNRHNTLGQQGQHIYTEYQSFNLGNNGQQPHHPNHGEPLVYIPLPGADGQRVPVVKVNEGQEAGFPFGGLFNETNLPQESQTQTTIVWQPVPHTSEYVVWCDPITEINEKSFQMRLPGTSTSATLIGLTSGASYNVLVESVNGDQKQKVLQDVVTVGNSVPGAGVIPTGRDVCYDSFTATYHEVNTEWERMSETGFKLWCKCLGLGSGHFRCDSSKWCHDSGHNYRIGEKWDRRAENGHMMSCTCLGNGKGEFKCEPHESTCYDEGKLYQVGNQWQKEYLGAICTCTCYGGQQGWRCENCRRPGAEVDADLIQPPVRTDAFDRYRENALRKLNIQCPIECLRPDLLADAHSPHD

SEQ ID NO: 309 - protein, 2480 aa, Danio rerio
MFGGPLGTALAVALLACAVQCMPKGTGKHKRQAQEHSVSSVSQDGCVMDGQFYGAGEKWERIYLGSTLLCTCHGVSKIECKSKPDAEETCYDKVNSRSYRVGETYERPKDGMIWDCTCIGSARGKISCTIANRCHEGGHSYKIGDTWQRPHDTGDYMLECVCLGNGKGEWTCKPVAERCYDNTAGTSYMVGETWEKPYQGWMIVDCTCLGEGSGRITCTSRNRCNDQDTRTSYRIGDTWSKTDSRGHVLQCLCTGNGRGEWKCERHASLHTTSLGTGSRVVTNVQPAVYHPQGVPEHPVEGSCLTEAGVSYAPGMRWSKAQGSKQMLCTCLGNGVSCEESESQSQVYGGTSGGEPCAFPFVFMGKTFYSCTSEGRNDGQLWCSTSSDFEKDYKYSFCTSNNVVVTTRGGNSNGALCQFPFLYNGRNYTDCTADGRRDGMKWCGTTYNFDKEQRFGFCPMAAHEEVCTTNEGVMYRVGDQWDRRHDVLGHMMRCTCVGNGRGEWSCIAYSQLKDQCIVDNLTYEVNQTFTKRHDEGYTMNCTCFGQGRGRWKCDAIDQCQEPETRVFYQIGESWDKLIQGIHYRCYCYGNGIGELSCEPQHSISGGHRPVQVIISEAGNQPNSHPIQWNAPASAHITQYILKWRPKNTHIQWMEVTIPGHVNSYTIAGLKPGVTYEGQLISILRFGRRETTRFDFSTVHGSLETSEGETTQPPRMVDTSESVTEITSSSFVISWVSASDTVSGFRVEYELSEEGGQTGQPMILDLPHSATSVNISELLPGRKYTVNVYEVTGEGEPNLILTTSQTTAPDAPSDHEVEDVADTSIRISWSKPLAPITGYRVVYTPSEEGSSGSVELNLPEHSTSLTLGDLRPGVLYNISIFSVEENQESEPVFVQVTTAGEPLAEEVPSPTDLQFYEVSDSKITITWTSPSSEVSGYRVSVGEVGPDGLIEKEVPYPVTQNAYAEITHLQPGTLYRFFIFSLKSGEESEPLVGEQATKPDPPTDIYFSNITEDSAVIVWLPPTAQITGYRLFLTVEGSNPKQLRIPGRLSQYTLLNLQPDTEYSATLHAERGNVLSEGSIATFATTPPMGNAPYFSTDVTDTSIIVSWSPLPKIGYKLTVRPSQGGEAPRDVTSELGSVLISGLTPGVEYTYSVQPVISGQEHGNPITRRVVTPLSPPTDLNLESNPNTGKLTVQWNDANIPDITGYRVTCTPTKGQQGNSLEEFVKAGQNSCTLENLSPGVEYNVSVFTVKDDMESVPVFTTVTPDVPKITDLSFINVTDSTIGLSWSPLNSTAVTGYRITVLAAGDSVPIFVEFVEPTTGFYTVHGLEPGIDYDITVTTVTENGESEPITITQQTAVPAPYGLSFGEVTADTMLVTWKAPQVPKSSDINQYIIRYHPVDEDDETTERTVEGSENFVVLRHLVPNTEYLVSVICVYEGREGSPAIGTQRTVFDAPVGLQFSDVGTTSFTVRWQAPRAIISGYRIRYQMTSGGRAKEERLPPSRSHFTLTGLTPETEYSISVYAVSGSRDSLPLTGTQSTISDAPTDLEVISSTPTSITVRWDAPSVTVRYYRITHGESGGSDAPLEFMVPGSQSTATIEDLRPGTDYTITVYAVTGRGDSPASSTPIHVKHRTDIDSPSQMEVTDVKDNTITVRWTPAAGPISRYRVNATPLTGEGPVLHAETTSDHTEITFSGLMPAVEYSIKVYALGQDGESLPLVENVVTTVDKPKDLSFTDVESSSMRISWDSPDGVVSSYRVLYYSPEEGERELFPAPHGDDESAVLHGLRPGTEYTVKVIALHDQSPSTALVGTQTTGIPGPTRLQFSQVGPTSFTVSWSSSDASLTGYRVAVSPKSKSGPTKEENITPDSTEFHATGLMPGTDYEVEVYGVKNSLTSPRVKGEITTPDNISPPRRVRISNVKDSSITLTWRSKTEAISGFLVEATPTMGGHNPIQRTIEPDSRTYTIAGLEPGTNYKINIYTLNGNSRSEPFTLTATTAKPVISPPTNLHFTSLASTSISFTWEPPRSTITGYYVTYEEAGGIPKELTPRPQAARTFASISGLIPGTEYIIKIVALNGAQRSTPLIGKARTQLEIEQLPPQLPNPSRPHLEVLDVPEDNDNFNNHVHVLGPNRHNTLGQQGQHIYTEYQSFNLGNNGQQPHHPNHGEPLVYIPLPGADGQRVPVVKVNEGQEAGFPFGGLFNETNLPQESQTQTTIVWQPVPHTSEYVVWCDPITEINEKSFQMRLPGTSTSATLIGLTSGASYNVLVESVNGDQKQKVLQDVVTVGNSVPGAGVIPTGRDVCYDSFTATYHEVNTEWERMSETGFKLWCKCLGLGSGHFRCDSSKWCHDSGHNYRIGEKWDRRAENGHMMSCTCLGNGKGEFKCEPHESTCYDEGKLYQVGNQWQKEYLGAICTCTCYGGQQGWRCENCRRPGAEVDADLIQPPVRTDAFDRYRENALRKLNIQCPIECLRPDLLADAHSPHD

SEQ ID NO: 310 - protein, 2302 aa, Rattus norvegicus
MLRGPGPGRLLLLAVLCLGTSVRCTETGKSKRQAQQIVQPPSPVAVSQSKPGCFDNGKHYQINQQWERTYLGNALVCTCYGGSRGFNCESKPEPEETCFDKYTGNTYKVGDTYERPKDSMIWDCTCIGAGRGRISCTIANRCHEGGQSYKIGDKWRRPHETGGYMLECLCLGNGKGEWTCKPIAEKCFDHAAGTSYVVGETWEKPYQGWMMVDCTCLGEGNGRITCTSRNRCNDQDTRTSYRIGDTWSKKDNRGNLLQCVCTGNGRGEWKCERHVLQSASAGSGSFTDVRTAIYQPQTHPQPAPYGHCVTDSGVVYSVGMQWLKSQGDKQMLCTCLGNGVSCQETAVTQTYGGNSNGEPCVLPFTYNGRTFYSCTTEGRQDGHLWCSTTSNYEQDQKYSFCTDHAVLVQTRGGNSNGALCHFPFLYNNRNYTDCTSEGRRDNMKWCGTTQNYDADQKFGFCPMAAHEEICTTNEGVMYRIGDQWDKQHDLGHMMRCTCVGNGRGEWACIPYSQLRDQCIVDDITYNVNDTFHKRHEEGHMLNCTCFGQGRGRWKCDPIDQCQDSETRTFYQIGDSWEKFVHGVRYQCYCYGRGIGEWHCQPLQTYPGTTGPVQVIITETPSQPNSHPIQWNAPEPSHITKYILRWRPKTSTGRWKEATIPGHLNSYTIKGLTPGVIYEGQLISIQQYGHQEVTRFDFTTSASTPVTSNTVTGETAPFSPVVATSESVTEITASSFVVSWVSASDTVSGFRVEYELSEEGDEPQYLDLPSTATSVNIPDLLPGRKYIVNVYQISEEGKQSLILSTSQTTAPDAPPDPTVDQVDDTSIVVRWSRPQAPITGYRIVYSPSVEGSSTELNLPETANSVTLSDLQPGVQYNITIYAVEENQESTPVFIQQETTGVPRSDDVPAPKDLQFVEVTDVKVTIMWTPPNSAVTGYRVDVLPVNLPGEHGQRLPVNRNTFAEVTGLSPGVTYLFKVFAVHQGRESKPLTAQQTTKLDAPTNLQFVNETDRTVLVTWTPPRARIAGYRLTVGLTRGGQPKQYNVGPMASKYPLRNLQPGSEYTVTLMAVKGNQQSPKATGVFTTLQPLRSIPPYNTEVTETTIVITWTPAPRIGFKLGVRPSQGGEAPREVTSDSGSIVVSGLTPGVEYTYTIQVLRDGQERDAPIVNRVVTPLSPPTNLHLEANPDTGVLTVSWERSTTPDITGYRITTTPTNGQQGTALEEVVHADQSSCTFENLNPGLEYNVSVYTVKDDKESAPISDTVIPEVPQLTDLSFVDITDSSIGLRWTPLNSSTIIGYRITVVAAGEGIPIFEDFVDSSVGYYTVTGLEPGIDYDISVITLINGGESAPTTLTQQTAVPPPTDLRFTNIGPDTMRVTWAPPPSIELTNLLVRYSPVKNEEDVAELSISPSDNAVVLTNLLPGTEYLVSVSSVYEQHESIPLRGRQKTGLDSPTGFDSSDVTANSFTVHWVAPRAPITGYIIRHHAEHSAGRPRQDRVPPSRNSITLTNLNPGTEYIVTIIAVNGREESPPLIGQQSTVSDVPRDLEVIASTPTSLLISWEPPAVSVRYYRITYGETGGNSPVQEFTVPGSKSTATINNIKPGADYTITLYAVTGRGDSPASSKPVSINYQTEIDKPSQMQVTDVQDNSISVRWLPSTSPVTGYRVTTAPKNGLGPTKSQTVSPDQTEMTIEGLQPTVEYVVSVYAQNRNGESQPLVQTAVTNIDRPKGLAFTDVDVDSIKIAWESPQGQVSRYRVTYSSPEDGIHELFPAPDGDEDTAELHGLRPGSEYTVSVVALHGGMESQPLIGVQSTAIPAPTNLKFTQVSPTTLTAQWTAPSVKLTGYRVRVTPKEKTGPMKEINLSPDSTSVIVSGLMVATKYEVSVYALKDTLTSRPAQGVVTTLENVSPPRRARVTDATETTITISWRTKTETITGFQVDAIPANGQTPVQRTISPDVRSYTITGLQPGTDYKIHLYTLNDNARSSPVVIDASTAIDAPSNLRFLTTTPNSLLVSWQAPRARITGYIIKYEKPGSPPREVVPRPRPGVTEATITGLEPGTEYTIYVIALKNNQKSEPLIGRKKTGQEALSQTTISWTPFQESSEYIISCQPVGTDEEPLQFQVPGTSTSATLTGLTRGVTYNIIVEALHNQRRHKVREEVVTVGNTEWCHDNGVNYKIGEKWDRQGENGQRMSCTCLGNGKGEFKCDPHEATCYDDGKTYHVGEQWQKEYLGAICSCTCFGGQRGWRCDNCRRPGAAEPSPDGTTGHTYNQYTQRYHQRTNTNVNCPIECFMPLDVQADRDDSRE

SEQ ID NO: 311 - protein, 2302 aa, Mus musculus
MLRGPGPGRLLLLAVLCLGTSVRCTEAGKSKRQAQQIVQPQSPVAVSQSKPGCFDNGKHYQINQQWERTYLGNALVCTCYGGSRGFNCESKPEPEETCFDKYTGNTYKVGDTYERPKDSMIWDCTCIGAGRGRISCTIANRCHEGGQSYKIGDKWRRPHETGGYMLECLCLGNGKGEWTCKPIAEKCFDHAAGTSYVVGETWEKPYQGWMMVDCTCLGEGNGRITCTSRNRCNDQDTRTSYRIGDTWSKKDNRGNLLQCVCTGNGRGEWKCERHALQSASAGSGSFTDVRTAIYQPQTHPQPAPYGHCVTDSGVVYSVGMQWLKSQGNKQMLCTCLGNGVSCQETAVTQTYGGNSNGEPCVLPFTYNGRTFYSCTTEGRQDGHLWCSTTSNYEQDQKYSFCTDHAVLVQTRGGNSNGALCHFPFLYNNRNYTDCTSEGRRDNMKWCGTTQNYDADQKFGFCPMAAHEEICTTNEGVMYRIGDQWDKQHDLGHMMRCTCVGNGRGEWACIPYSQLRDQCIVDDITYNVNDTFHKRHEEGHMLNCTCFGQGRGRWKCDPIDQCQDSETRTFYQIGDSWEKFVHGVRYQCYCYGRGIGEWHCQPLQTYPGTTGPVQVIITETPSQPNSHPIQWNAPEPSHITKYILRWRPKTSTGRWKEATIPGHLNSYTIKGLTPGVIYEGQLISIQQYGHREVTRFDFTTSASTPVTSNTVTGETAPYSPVVATSESVTEITASSFVVSWVSASDTVSGFRVEYELSEEGDEPQYLDLPSTATSVNIPDLLPGRKYIVNVYQISEEGKQSLILSTSQTTAPDAPPDPTVDQVDDTSIVVRWSRPQAPITGYRIVYSPSVEGSSTELNLPETANSVTLSDLQPGVQYNITIYAVEENQESTPVFIQQETTGTPRSDNVPPPTDLQFVELTDVKVTIMWTPPDSVVSGYRVEVLPVSLPGEHGQRLPVNRNTFAEITGLSPGVTYLFKVFAVHQGRESNPLTAQQTTKLDAPTNLQFVNETDRTVLVTWTPPRARIAGYRLTAGLTRGGQPKQYNVGPLASKYPLRNLQPGSEYTVTLVAVKGNQQSPKATGVFTTLQPLRSIPPYNTEVTETTIVITWTPAPRIGFKLGVRPSQGGEAPREVTSDSGSIVVSGLTPGVEYTYTIQVLRDGQERDAPIVNRVVTPLSPPTNLHLEANPDTGVLTVSWERSTTPDITGYRITTTPTNGQQGTSLEEVVHADQSSCTFENLNPGLEYNVSVYTVKDDKESAPISDTVVPEVPQLTDLSFVDITDSSIGLRWTPLNSSTIIGYRITVVAAGEGIPIFEDFVDSSVGYYTVTGLEPGIDYDISVITLINGGESAPTTLTQQTAVPPPTDLRFTNIGPDTMRVTWAPPPSIELTNLLVRYSPVKNEEDVAELSISPSDNAVVLTNLLPGTEYLVSVSSVYEQHESIPLRGRQKTGLDSPTGFDSSDITANSFTVHWVAPRAPITGYIIRHHAEHSVGRPRQDRVPPSRNSITLTNLNPGTEYVVSIIAVNGREESPPLIGQQATVSDIPRDLEVIASTPTSLLISWEPPAVSVRYYRITYGETGGNSPVQEFTVPGSKSTATINNIKPGADYTITLYAVTGRGDSPASSKPVSINYKTEIDKPSQMQVTDVQDNSISVRWLPSTSPVTGYRVTTTPKNGLGPSKTKTASPDQTEMTIEGLQPTVEYVVSVYAQNRNGESQPLVQTAVTNIDRPKGLAFTDVDVDSIKIAWESPQGQVSRYRVTYSSPEDGIRELFPAPDGEDDTAELQGLRPGSEYTVSVVALHDDMESQPLIGIQSTAIPAPTNLKFSQVTPTSFTAQWIAPSVQLTGYRVRVNPKEKTGPMKEINLSPDSSSVIVSGLMVATKYEVSVYALKDTLTSRPAQGVITTLENVSPPRRARVTDATETTITISWRTKTETITGFQVDAIPANGQTPVQRSISPDVRSYTITGLQPGTDYKIHLYTLNDNARSSPVIIDASTAIDAPSNLRFLTTTPNSLLVSWQAPRARITGYIIKYEKPGSPPREVVPRPRPGVTEATITGLEPGTEYTIYVIALKNNQKSEPLIGRKKTGQEALSQTTISWTPFQESSEYIISCQPVGTDEEPLQFQVPGTSTSATLTGLTRGVTYNIIVEALQNQRRHKVREEVVTVGNAEWCHDNGVNYKIGEKWDRQGENGQRMSCTCLGNGKGEFKCDPHEATCYDDGKTYHVGEQWQKEYLGAICSCTCFGGQRGWRCDNCRRPGAAEPSPDGTTGHTYNQYTQRYNQRTNTNVNCPIECFMPLDVQADRDDSRE

SEQ ID NO: 312 - protein, 402 aa, Mus musculus
MQMSSALACLILGLVLVSGKGFALPLRESHTAHQATDFGVKVFQQVVQASKDRNVVFSPYGVSSVLAMLQMTTAGKTRRQIQDAMGFKVNEKGTAHALRQLSKELMGPWNKNEISTADAIFVQRDLELVQGFMPHFFKLFQTMVKQVDFSEVERARFIINDWVERHTKGMINDLLAKGAVDELTRLVLVNALYFSGQWKTPFLEASTHQRLFHKSDGSTVSVPMMAQSNKFNYTEFTTPDGLEYDVVELPYQGDTLSMFIAAPFEKDVHLSALTNILDAELIRQWKGNMTRLPRLLILPKFSLETEVDLRGPLEKLGMPDMFSATLADFTSLSDQEQLSVAQALQKVRIEVNESGTVASSSTAFVISARMAPTEMVIDRSFLFVVRHNPTETILFMGQVMES

SEQ ID NO: 313 - protein, 403 aa, Xenopus laevis
MSYNIRCMLVFLLSLTLVTSAQNRISRVAQKGTRFGLRLFQEVLVDQRGKNLGFSPYGVMSALTVLQSGAAGKTLDQIRKALNFGQKEWAVALSLHKLRVQISRQQKSTEDPKPVHVADGLFVQRDLSLTPGFLQKFQATFHRHVSQINFTDAAQAKDIINQWVEKKTDGMIKDLVGSNNIPPLTRLVLLSAIHFSGKWTVPFPEKATHQRPFYRSDGSHVIVQMMANTGKYNYGEFTTPDGDFYDVIELPYEGEELSMIIAAPYEKGVPLSTITNILTSELIVQWKAQMKKVARLLVLPKFSLLSEVDLKKPLERLGITNMFTEEMADFSRLSSEKPLYVSEAFQKIKVEVTERGTRASAATAAILLARMAPLEVIMDHPFLFMVRHNPTGTLLFVGQVMEP

SEQ ID NO: 314 - protein, 208 aa, Danio rerio
MFCLVLLKVCSGASLDRFESGKPRATEVNLLHTSEKTNITGLQADNRTSVGDDDYEEDYEGDYELNLPRVAFSTKPKHPSAMPTTEKTKKRKRKGKGKGRGNKKNLCEEEYKDFCIHGVCHYLRDLRTHSCVCHGGYSGERCHVFTLPVGKEEQRYSRTTALAVIAVVLSLMCLAVIAILLALRYHKKDDADVESEEKVKLEATSVKQ

SEQ ID NO: 315 - protein, 239 aa, Danio rerio
ALEAGRFSQTDYCFIMSWTIPKKRKMDTFRIMFCLVLLKVCSGASLDRFESGKPRTTEVNLLHTSEKTNITGLQADNGTSVGDDDYEEDYEGDYELNLPRVAFSTKPKHPSAMPTTEKTKKRKRKGKGKGRGNKKNLCKEEYKDFCIHGVCHYQRDLRTHSCVCHGGYSGERCHVFTLPVGKEEQRYSRTTALAVIAVVLSLMCLAVIAILLALRYHKKDDADVESEEKVKLEATSVKQ

SEQ ID NO: 316 - protein, 208 aa, Danio rerio; identical to SEQ ID NO: 314

SEQ ID NO: 317 - protein, 208 aa, Rattus norvegicus
MKLLPSVVLKLFLAAVLSALVTGESLERLRRGLAAATSNPDPPTGTTNQLLPTGADRAQEVQDLEGTDLDLFKVAFSSKPQALATPGKEKNGKKKRKGKGLGKKRDPCLKKYKDYCIHGECRYLKELRIPSCHCLPGYHGQRCHGLTLPVENPLYTYDHTTVLAVVAVVLSSVCLLVIVGLLMFRYHRRGGYDLESEEKVKLGMASSH

SEQ ID NO: 318 - protein, 218 aa, Oncorhynchus mykiss
MNIYLRFAIFIVYGSVSFRISSGTSANTIDRHGDKSPVQLAAVSLLHNDKEIRDNQLEYDEEEYYYEHGDEDYLSGDYEMQFPKVAFSTKPKDLPVAPYTVRTREGKRKGKGKKRNPCLRKYKDYCIHGVCQYLRELREPSCICLLGYSGERCHLFTLPVTKEAEGYNRTIALAVVAVVVSFLCLTVIAILMAIRYHKQGQYNLENEEKVKLEAVAYP

SEQ ID NO: 319 - protein, 139 aa, Oncorhynchus mykiss
MQFPKVAFSTKPKDLPVAPYTVRTREGKRKGKGKKRNPCLRKYKDYCIHGVCQYLRELREPSCICLLGYSGERCHLFTLPVTKEAEGYNRTTALAVVAVVVSFPCLTVIAILMAIRYHKQGQYNLENEEKVKLEAVAYP

SEQ ID NO: 320 - protein, 208 aa, Homo sapiens
MKLLPSVVLKLFLAAVLSALVTGESLERLRRGLAAGTSNPDPPTVSTDQLLPLGGGRDRKVRDLQEADLDLLRVTLSSKPQALATPNKEEHGKRKKKGKGLGKKRDPCLRKYKDFCIHGECKYVKELRAPSCICHPGYHGERCHGLSLPVENRLYTYDHTTILAVVAVVLSSVCLLVIVGLLMFRYHRRGGYDVENEEKVKLGMTNSH

SEQ ID NO: 321 - protein, 212 aa, Gallus gallus
MDGRVVLIHALLTAVCSAAVGKFGRDGPHGEALHNEVLLHEGGGVASVSATAPLLGGIVEKEGGGAASGDALSELPRVAFLSKPQGPVTPKKKGNGNKRRKGKGLGKKRDPCLRKYKDFCIHGECKYIRELGAPSCICQPGYHGERCHGLLLPVEHPPSTYDHTTALAVVAVVLSSLCLVIITALLMFRCHKRGVYDVENEEKIKLGITVNH

SEQ ID NO: 322 - protein, 208 aa, Mus musculus
MKLLPSVMLKLFLAAVLSALVTGESLERLRRGLAAATSNPDPPTGSTNQLLPTGGDRAQGVQDLEGTDLNLFKVAFSSKPQGLATPSKERNGKKKKKGKGLGKKRDPCLRKYKDYCIHGECRYLQEFRTPSCKCLPGYHGHRCHGLTLPVENPLYTYDHTTVLAVVAVVLSSVCLLVIVGLLMFRYHRRGGYDLESEEKVKLGVASSH

SEQ ID NO: 323 - protein, 208 aa, Homo sapiens; identical to SEQ ID NO: 320

SEQ ID NO: 324 - protein, 236 aa, Xiphophorus maculatus
MRIFPVVLLLVHGLVVSRLASGAAVDQHEGDRQRHTSVFNLLDTTRDRRAEEERTGATTVQHGQEGKEEEEDDGYYYDDESEDEMSGDYDMDLPRVAMSSKPKDPSSLPEPRNTEETQRRGKGIKKGKGKGKKRNPCLKKYKDFCIHGTCLYLRELRAPSCVCRPNYSGERCQLFMLPVHTPEGYSRTTALAVIAVVLSSVCLTIIGLLLMLRFHKRGAYDVESEEKVKLGLASNN

SEQ ID NO: 325 - protein, 139 aa, Oncorhynchus mykiss; identical to SEQ ID NO: 319

SEQ ID NO: 326 - protein, 208 aa, Bos taurus
MKLLPSVVLKLFLAAVLSALVTGESLERLRRGLAAGTSNLDTPTQSTDQLLPAGGGQGREVLDLEEANLDLFRAAFSSKPQALATPSKEERGKRKKKGKGLGKKRNPCLRRYKDFCIHGECKYVKELRVPTCICHPGYHGERCHGLSLPVKNRLYTYDHTTILVVVAVVLSSVCLLVIMGLLMFWYHRRGGYDVENEEKVKLGMTTSH

SEQ ID NO: 327 - protein, 193 aa, Rattus norvegicus
MLSALVTGESLERLRRGLAAATSNPDPPTGTTNQLLPTGADRAQEVQDLEGTDLDLFKVAFSSKPQALATPGKEKNGKKKRKGKGLGKKRDPCLKKYKDYCIHGECRYLKELRIPSCHCLPGYHGQRCHGLTLPVENPLYTYDHTTVLAVVAVVLSSVCLLVIVGLLMFRYHRRGGYDLESEEKVKLGMASSH

SEQ ID NO: 328 - protein, 208 aa, Mus musculus; identical to SEQ ID NO: 322

SEQ ID NO: 329 - protein, 585 aa, Homo sapiens
MTPPRLFWVWLLVAGTQGVNDGDMRLADGGATNQGRVEIFYRGQWGTVCDNLWDLTDASVVCRALGFENATQALGRAAFGQGSGPIMLDEVQCTGTEASLADCKSLGWLKSNCRHERDAGVVCTNETRSTHTLDLSRELSEALGQIFDSQRGCDLSISVNVQGEDALGFCGHTVILTANLEAQALWKEPGSNVTMSVDAECVPMVRDLLRYFYSRRIDITLSSVKCFHKLASAYGARQLQGYCASLFAILLPQDPSFQMPLDLYAYAVATGDALLEKLCLQFLAWNFEALTQAEAWPSVPTDLLQLLLPRSDLAVPSELALLKAVDTWSWGERASHEEVEGLVEKIRFPMMLPEELFELQFNLSLYWSHEALFQKKTLQALEFHTVPFQLLARYKGLNLTEDTYKPRIYTSPTWSAFVTDSSWSARKSQLVYQSRRGPLVKYSSDYFQAPSDYRYYPYQSFQTPQHPSFLFQDKRVSWSLVYLPTIQSCWNYGFSCSSDELPVLGLTKSGGSDRTIAYENKALMLCEGLFVADVTDFEGWKAAIPSALDTNSSKSTSSFPCPAGHFNGFRTVIRPFYLTNSSGVD

SEQ ID NO: 330 - protein, 585 aa, Homo sapiens; identical to SEQ ID NO: 329

SEQ ID NO: 331 - protein, 138 aa, Mus musculus
EGRRRGLLQRYQSFQTPQHPSFLFKDKQISWSATYLPTMQSCWNYGFSCTSNELPVLGLTTSSYSNPTIGYENRVLILCGGYSVVDVTSFEGSKAPIPTALDTNSSKTPSLFPCASGAFSSFRVVIRPFYLTNSTDMV

SEQ ID NO: 332 - protein, 574 aa, Rattus norvegicus
MALLWLLSVFLLVPGTQGAKDGDMRLVNGASASEGRVEIFYRGRWGTVCDNLWNLLDAHVVCRALGYENATQALSRAAFGPGKGPIMLDEVECTGNESSLANCSSLGWMVSHCGHEKDAGVVCSNDSRGIHILDLSGELPDALGQIFDSQQDCDLFIQVTGQGHGDLSLCAHTLILRTNPEAQALWQVVGSSVIMRVDAECMPVVRDFLRYFYSRRIEVSMSSVKCLHKLASAYGATELQGYCGRLFVTLLPQDPTFHTPLELYEYAQATGDSVLEDLCVQFLAWNFEPLTQAEAWLSVPNALIQALLPKSELAVSSELDLLKAVDQWSTATGASHGDVERLVEQIRFPMMLPQELFELQFNLSLYQGHQALFQRKTMEALEFHTVPLKVLAKYRSLNLTEDVYKPRLYTSSTWSSLLMAGAWSTQSYKYRQFYTYNYGSQSRYSSYQNFQTPQHPSFLFKDKLISWSATYLPTIQSCWNYGFSCTSDELPVLGLTTSSYSDPTIGYENKALILCGGYSVVDVTTFIGSKAPIPGTQETNSSKTPSLFPCASGAFSSFREVIRPFYLTNSTDTE

SEQ ID NO: 333 - protein, 577 aa, Mus musculus
MALLWLLSVFLLVPGTQGTEDGDMRLVNGASANEGRVEIFYRGRWGTVCDNLWNLLDAHVVCRALGYENATQALGRAAFGPGKGPIMLDEVECTGTESSLASCRSLGWMVSRCGHEKDAGVVCSNDTTGLHILDLSGELSDALGQIFDSQQGCDLFIQVTGQGYEDLSLCAHTLILRTNPEAQALWQVVGSSVIMRVDAECMPVVRDFLRYFYSRRIEVSMSSVKCLHKLASAYGATELQDYCGRLFATLLPQDPTFHTPLDLYAYARATGDSMLEDLCVQFLAWNFEPLTQSESWSAVPTTLIQALLPKSELAVSSELDLLKAVDQWSTETIASHEDIERLVEQVRFPMMLPQELFELQFNLSLYQDHQALFQRKTMQALEFHTVPVEVLAKYKGLNLTEDTYKPRLYTSSTWSSLVMASTWRAQRYEYNRYNQLYTYGYGSVARYNSYQSFQTPQHPSFLFKDKQISWSATYLPTMQSCWNYGFSCTSNELPVLGLTTSSYSNPTIGYENRVLILCGGYSVVDVTSFEGSKAPIPTALDTNSSKTPSLFPCASGAFSSFRVVIRPFYLTNSTDMV

SEQ ID NO: 334 - protein, 567 aa, Danio rerio
MIMYIIWALLFIPVSAQQWTLFDEQAKPKREGRVRLVGGLPSSGRVEVYHDGQWGTVCDDGWDLAEAQVVCRQLGFPGAVSVASGGQYGEGSGPIWLDDMNCKGSESILSECCFKGWGVNDCTHQEDAGVVCDTGTNATNIRQISVDNSLGLSDDLGLLFDSEDGCDFIIAVQDLGEEAELTLCVHRVILMMYPELNITNDTRNLTVDVSQTCQSHVSALIRYLYTRQIDVSATSAQCLYQLAFIFGVQRLMEDVGRVFTALIPEDNTFQTPVSMYEYGLRTGDLVLQENVLQYLSWNCEFLISSPVWSTVSFEMMDALLQRSDLIVKDEAVLLEALERWIQDKGDQISSDKQASLLSHIRFLLIPVDKLYDIQFSSSALYQNNEKLYLTGLLRGFEFNALPFSKIRNQIDNASSEYLPRIYTGDEWSVFINDTTVSSPYYNYNYYGQSNRIQTFFTSAHPSALYKDQKVQWQAQVFLTLQECSNYGVSCNTLPVARFYGYSNQYSYSNIISYNNRLILTCKNQNNVFHVQEFKNDVAVIPTNSSMGLPNPCPDDYSFRFVVRPQYI

SEQ ID NO: 335 - protein, 574 aa, Rattus norvegicus
MALLWLLSVFLLVPGTQGAKDGDMRLVNGASASEGRVEIFYRGRWGTVCDNLWNLLDAHVVCRALGYENATQALSRAAFGPGKGPIMLDEVECTGNESSLANCSSLGWMVSHCGHEKDAGVVCSNDSRGIHILDLSGELPDALGQIFDSQQDCDLFIQVTGQGHGDLSLCAHTLILRTNPEAQALWQVVGSSVIMRVDAECMPVVRDFLRYFYSRRIEVSMSSVKCLHKLASAYGATELQGYCGRLFVTLLPQDPTFHTPLELYEYAQATGDSVLEDLCVQFLAWNFEPLTQAEAWLSVPNALIQALLPKSELAVSSELDLLKAVDQWSTATGASHGDVERLVEQIRFPMMLPQELFELQFNLSLYQGHQALFQRKTMEALEFHTVPLKVLAKYRSLNLTEDVYKPRLYTSSTWSSLLMAGAWSTQSYKYRQFYTYNYGSQSRYSSYQNFQTPQHPSFLFKDKLISWSATYLPTIQSCWNYGFSCTSDELPVLGLTTSSYSDPTIGYENKALILCGGYSVVDVTTFIGSKAPIPGTQETNSSKTPSLFPCASGAFSSFRVVIRPFYLTNSTDTE

SEQ ID NO: 336 - protein, 567 aa, Danio rerio; identical to SEQ ID NO: 334

SEQ ID NO: 337 - protein, 577 aa, Mus musculus; identical to SEQ ID NO: 333

SEQ ID NO: 338 - protein, 585 aa, Homo sapiens; identical to SEQ ID NO: 329

SEQ ID NO: 339 - protein, 585 aa, Homo sapiens; identical to SEQ ID NO: 329

SEQ ID NO: 340 - protein, 585 aa, Homo sapiens; identical to SEQ ID NO: 329

SEQ ID NO: 341 - protein, 585 aa, artificial sequence; identical to SEQ ID NO: 329
  Synthetic

SEQ ID NO: 342 - protein, 585 aa, Homo sapiens; identical to SEQ ID NO: 329

SEQ ID NO: 343 - protein, 165 aa, Homo sapiens
MTPPRLFWVWLLVAGTQGVNDGDMRLADGGATNQGRVEIFYRGQWGTVCDNLWDLTDASVVCRALGFENATQALGRAAFGQGSGPIMLDEVQCTGTEASLADCKSLGWLKSNCRHERDAGVVCTNGTSTPEGLTSPCRQSSASTSWPLPMGPGSCRATAQASLPS

SEQ ID NO: 344 - protein, 391 aa, Homo sapiens
MSVDAECVPMVRDLLRYFYSRRIDITLSSVKCFHKLASAYGARQLQGYCASLFAILLPQDPSFQMPLDLYAYAVATGDALLEKLCLQFLAWNFEALTQAEAWPSVPTDLLQLLLPRSDLAVPSELALLKAVDTWSWGERASHEEVEGLVEKIRFPMMLPEELFELQFNLSLYWSHEALFQKKTLQALEFHTVPFQLLARYKGLNLTEDTYKPRIYTSPTWSAFVTDSSWSARKSQLVYQSRRGPLVKYSSDYFQAPSDYRYYPYQSFQTPQHPSFLFQDKRVSWSLVYLPTIQSCWNYGFSCSSDELPVLGLTKSGGSDRTIAYENKALMLCEGLFVADVTDFEGWKAAIPSALDTNSSKSTSSFPCPAGHFNGFRTVIRPFYLTNSSGVD

SEQ ID NO: 345 - protein, 581 aa, Homo sapiens
MMTWRFPGAHLGSGVNDGDMRLADGGATNQGRVEIFYRGQWGTVCDNLWDLTDASVVCRALGFENATQALGRAAFGQGSGPIMLDEVQCTGTEASLADCKSLGWLKSNCRHERDAGVVCTNETRSTHTLDLSRELSEALGQIFDSQRGCDLSISVNVQGEDALGFCGHTVILTANLEAQALWKEPGSNVTMSVDAECVPMVRDLLRYFYSRRIDITLSSVKCFHKLASAYGARQLQGYCASLFAILLPQDPSFQMPLDLYAYAVATGDALLEKLCLQFLAWNFEALTQAEAWPSVPTDLLQLLLPRSDLAVPSELALLKAVDTWSWGERASHEEVEGLVEKIRFPMMLPEELFELQFNLSLYWSHEALFQKKTLQALEFHTVPFQLLARYKGLNLTEDTYKPRIYTSPTWSAFVTDSSWSARKSQLVYQSRRGPLVKYSSDYFQAPSDYRYYPYQSFQTPQHPSFLFQDKRVSWSLVYLPTIQSCWNYGFSCSSDELPVLGLTKSGGSDRTIAYENKALMLCEGLFVADVTDFEGWKAAIPSALDTNSSKSTSSFPCPAGHFNGFRTVIRPFYLTNSSGVD

SEQ ID NO: 346 - protein, 577 aa, Mus musculus; identical to SEQ ID NO: 333

SEQ ID NO: 347 - protein, 585 aa, artificial sequence
  Synthetic
MTPPRLFWVWLLVAGTQGVNDGDMRLADGGATNQGRVEIFYRGQWGTVCDNLWDLTDASVVCRALGFENATQALGRAAFGQGSGPIMLDEVQCTGTEASLADCKSLGWLKSNCRHERDAGVVCTNETRSTHTLDLSRELSEALGQIFDSQRGCDLSISVNVQGEDALGFCGHTVILTANLEAQALWKEPGSNVTMSVDAECVPMVRDLLRYFYSRRIDITLSSVKCFHKLASAYGARQLQGYCASLFAILLPQDPSFQMPLDLYAYAVATGDALLEKLCLQFLAWNFEALTQAEAWPSVPTDLLQLLLPRSDLAVPSELALLKAVDTWSWGERASHEEVEGLVEKIRFPMMLPEELFELQFNLSLYWSHEALFQKKTLQALEFHTVPFQLLARYKGLNLTEDTYKPRIYTSPTWSAFVTDSSWSARKSQLVYQSRRGPLVKYSSDYFQAPSDYRYYPYQSFQTPQHPSFLFQDKRVSWSLVYLPTIQSCWNYGFSCSSDELPVLGLTKSGGSDRTIAYENKALMLCEGLFVADVTDFEGWKAAIPSALDTNSSKSTSSFPCPAGHFNGFRTVIRPFYLTNSSSVD

SEQ ID NO: 348 - protein, 555 aa, Bos taurus
MAPLRLFWIWLLVVGTRGVKDGDMRLADGGSANQGRVEIYYNGQWGTVCENMWDLTDASVVCRALGFQNATEALGGAAFGPGYGPIMLDEVRCTGTEPSLANCSSLGWMRSNCRHDKDASVICTNETRGVYTLDLSGELPAALEQIFESQKGCDLFITVKVREEDEIAMCAHKLILSTNPEAHGLWKEPGSRVTMEVDAECVPVVKDFIRYLYSRRIDVSLSSVKCLHKFASAYQAKQLQSYCGHLFAILIPQDPSFWTPLELYAYALATRDTVLEEICVQFLAWNFGALTQAEAWPSVPPALLQGLLSRTELVVPSELVLLLAVDKWSQERHTSHKEVEALVGQVRFPMMPPQDLFSLQFNLSLYWSHEALFQKKILQALEFHTVPFELLAQYWGLNLTEGTYQPRLYTSPTWSQSVMSSSYNPSRSFQTPQHPSFLFHDSSVSWSFVYLPTLQSCWNYGFSCSSDDPPLLALSKSSYSKSNPTIGYENRALLHCEGSFVVDVIDFKGWKALVPSALATNSSRSTSLFPCPSGVFSRFQVVIRPFYLTNSTDMD

SEQ ID NO: 349 - protein, 574 aa, Rattus norvegicus; identical to SEQ ID NO: 335

SEQ ID NO: 350 - protein, 590 aa, Rattus norvegicus
MFTERTTEGVGLPGQAMALLWLLSVFLLVPGTQGAKDGDMRLVNGASASEGRVEIFYRGRWGTVCDNLWNLLDAHVVCRALGYENATQALSRAAFGPGKGPIMLDEVECTGNESSLANCSSLGWMVSHCGHEKDAGVVCSNDSRGIHILDLSGELPDALGQIFDSQQDCDLFIQVTGQGHGDLSLCAHTLILRTNPEAQALWQVVGSSVIMRVDAECMPVVRDFLRYFYSRRIEVSMSSVKCLHKLASAYGATELQGYCGRLFVTLLPQDPTFHTPLELYEYAQATGDSVLEDLCVQFLAWNFEPLTQAEAWLSVPNALIQALLPKSELAVSSELDLLKAVDQWSTATGASHGDVERLVEQIRFPMMLPQELFELQFNLSLYQGHQALFQRKTMEALEFHTVPLKVLAKYRSLNLTEDVYKPRLYTSSTWSSLLMAGAWSTQSYKYRQFYTYNYGSQSRYSSYQNFQTPQHPSFLFKDKLISWSATYLPTIQSCWNYGFSCTSDELPVLGLTTSSYSDPTIGYENKALILCGGYSVVDVTTFIGSKAPIPGTQETNSSKTPSLFPCASGAFSSFRVVIRPFYLTNSTDTE

SEQ ID NO: 351 - protein, 577 aa, Mus musculus; identical to SEQ ID NO: 333

SEQ ID NO: 352 - protein, 577 aa, Mus musculus; identical to SEQ ID NO: 333

SEQ ID NO: 353 - protein, 585 aa, artificial sequence; identical to SEQ ID NO: 329
  Synthetic

SEQ ID NO: 354 - protein, 386 aa, Danio rerio
MVSSTAALMVLMVTQVFFAGSSGLVPQVGRSSLSPDVLHAFELRLLSMFGLQHRPTPSTSAVVPQYMLDLYSAHSVNAEQVSRPRAHLGKGSERSASRANTIRSFHHDESTEDPSSSSVRTTQRFLFNLTSIPDEELVTSADVRVFREQIVSSLNNASAGFHRINVHEIIRPSGSLQEPITRLLDTRLVQHSLSKWESFDVTPAVLKWTTDGHPNHGILVEISHPDQDSRKHVRVSRSLHNNEDTWSQMRPLLVTYSHDGKGNVLHSREKRQARNNKQRKKHKANCRRHSLYVDFSDVGWNDWIVAPPGYHAFYCQGECPFPLADHLNSTTNAMVQTLVNSVNSNIPRACCVPTDLSPVSLLYLDEYERVILKNYQDMVVEGCGCR

SEQ ID NO: 355 - protein, 232 aa, Tropheus duboisi
EVGRRKYSESGKQTPEQSESFLNDFELRLLNVFGLGRRPTPSKQAVVPQYMVDLYRMHSANGDHSTKRPKSMGKHAERAASKANTIRSFHHEESMEALASLKGKTTQQFYFNLTSIPNEELITSAELRIYRDQVMGSASPTESSISDSTPASGLHRINIYEIFGVPATQGKEPLLRLLDTRMVQDSLSRWESFDVSPAISHWTSGNGHNHGFLVEVIHPEEGEMDSKDAHRR

SEQ ID NO: 356 - protein, 232 aa, Labidochromis caeruleus; identical to SEQ ID NO: 355

SEQ ID NO: 357 - protein, 232 aa, Haplochromis brownae; identical to SEQ ID NO: 355

SEQ ID NO: 358 - protein, 232 aa, Astatoreochromis alluaudi
EVGRRKYSESGKQTPEQSESFLNDFELRLLNVFGLGRRPTPSKQAVVPQYMVDLYRMHSANGDHSTKRPKSMGKHAERAASKANTIRSFHHEESMEALASLKGKTTQQFYFNVTSIPNEELITSAELRIYRDQVMGSASPTESSISDSTPASGLHRINIYEIFGVPATQGKEPLLRLLDTRMVQDSLSRWESFDVSPAISHWTSGNGHNHGFLVEVIHPEEGEMDSKDVHRR

SEQ ID NO: 359 - protein, 395 aa, Bos taurus
MVAGTRCLLALLLPQVLLGGAAGLIPELGRRKFAASAGRSSSQPSDDVLSEFELRLLSMFGLKQRPTPSRDAVVPPYMLDLYRQHSGQPGAPAPDHRLERAASLANTVRSFHHEESLEELPEMSGKTTRRFFFNLTSIPTEEFITSAELQVFRKHMPEALENNSSFHHRINIYEIIKPATANSKFPVTRLLDTRLVTQNASRWESFDVTPAVMRWTAQGLTNHGFVVEVAHPEDSHGASKRHVRISRSLHQDEHSWSQIRPLLVTFGHDGKGHPLHRREKRQAKHKQRKRLKSSCKRHPLYVDFSDVGWNDWIVAPPGYHAFYCHGECPFPLADHLNSTNHAIVQTLVNSVNSKIPKACCVPTELSAISMLYLDENEKVVLKNYQDMVVEGCGCR

SEQ ID NO: 360 - protein, 392 aa, Gallus gallus
MVAATRSLLALLLCRVLLGGAAGLMPEVGRRRFSEPGRAASAAQRPEDLLGEFELRLLHMFGLKRRPSPGKDVVIPPYMLDLYRLHAGQQLGYPLERAASRANTVCSFHHEEVLEELPETSGKTARRFFFNLTSIPNEESVTSAELQIFREQVHEAFESNSSYHHRINIYEIMKPATATSKDPVTRLLDTRLVHHNASKWESFDVTPAVLRWIAHGQPNHGFVVEVVHLDKENSASKRHVRISRSLHQDEDSWSQLRPLLVTFGHDGKGHPLHKREKRQAKHKQRKRHKYSCKRHPLYVDFNDVGWNDWIVAPPGYSAFYCHGECPFPLADHLNSTNHAIVQTLVNSVNSKIPKACCVPTELSAISMLYLDENEKVVLKNYQDMVVEGCGCR

SEQ ID NO: 361 - protein, 395 aa, Bos taurus; identical to SEQ ID NO: 359

SEQ ID NO: 362 - protein, 411 aa, Danio rerio
MVAVVRALTVLLLGQVLLGGAVGLIPEIDRRKYSDSGRHTPERTDTNFLNEFELRLLNMFGLKRKPTPSKSAVVPQYMLDLYYMHSENDDPNIRRPRSTMGKHVERAASRANTIRSFHHEEAFEALSSLKGKTTQQFFFNLTSIPGEELISAAELRIFRDQVLGDASTSGFHRINIYEVFRPALAPSKEPLTRLLDTRLVQDSHTRWESFDVGSAVARWARESQHNHGLLVEVLHPKESEVSEEAESNRRKHVRVSRSLHADEDSWAQARPLLVTYSHDGQGTAVLHSNREKRQARRGQKPRRKHHQRSNCRRHALYVDFSDVGWNEWIVAPPGYHAFYCHGECPFPLPDHLNSTNHAIVQTLVNSVNSNIPKACCIPTELSPISLLYLDEYEKVILKNYQDMVVEGCGCR

SEQ ID NO: 363 - protein, 381 aa, Xenopus laevis
MVAGIHSLLLLLFYQVLLSGCTGLIPEEGKRKYTESGRSSPQQSQRVLNQFELRLLSMFGLKRRPTPGKNVVIPPYMLDLYHLHLAQLAADEGTSAMDFQMERAASRANTVRSFHHEESMEEIPESREKTIQRFFFNLSSIPNEELVTSAELRIFREQVQEPFESDSSKLHRINIYDIVKPAAAASRGPVVRLLDTRLVHHNESKWESFDVTPAIARWIAHKQPNHGFVVEVTHLDNDKNVPKKHVRISRSLTPDKDNWPQIRPLLVTFSHDGKGHALHKRQKRQARHKQRKRLKSSCRRHPLYVDFSDVGWNDWIVAPPGYHAFYCHGECPFPLADHLNSTNHAIVQTLVNSVNTNIPKACCVPTELSAISMLYLDENEK

SEQ ID NO: 364 - protein, 396 aa, Homo sapiens [sequence omitted]

SEQ ID NO: 365 - protein, 115 aa, Homo sapiens
MVAGTRCLLALLLPQVLLGGAAGLVPELGRRKFAAASSGRPSSQPSDEVLSEFELRLLSMFGLKQRPTPSRDAVVPPYMLDLYRRHSGQPGSPAPDHRLERAASRANTVRSFHHE

SEQ ID NO: 366 - protein, 115 aa, Homo sapiens; identical to SEQ ID NO: 365

SEQ ID NO: 367 - protein, 396 aa, Homo sapiens [sequence omitted]

SEQ ID NO: 368 - protein, 396 aa, Homo sapiens [sequence omitted]

SEQ ID NO: 369 - protein, 396 aa, Homo sapiens [sequence omitted]

SEQ ID NO: 370 - protein, 374 aa, Homo sapiens
MVAGTRCLLALLLPQVLLGGAAGLVPELGRRKFAAASSGRPSSQPSDEVLSEFELRLLSMFGLKQRPTPSRDAVVPPYMLDLYRRHSGQPSSPAPDHRLERAASRANTVRSFHHEESLEELPETSGKTTRRFFFNLSSIPTEEFITSAELQVFREQMQDALGNNSSFHHRINIYEIIKPATANSKFPVTRLLDTRLVNQNASRWESFDVTPAVMRWTAQGHANHGFVVEVAHLEEKQGVSKRHVRISRSLHQDEHSWSQIRPLLVTFGHDGKGHPLHKREKRQAKHKQRKRLKSSCKRHPLYVDFSDVGWNDWIVAPPGYHAFYCHGECPFPLADHLNSTNHAIVQTLVNSVNSKIPKACCVPTELSAISMLYL

SEQ ID NO: 371 - protein, 396 aa, Homo sapiens [sequence omitted]

SEQ ID NO: 372 - protein, 396 aa, Homo sapiens [sequence omitted]

SEQ ID NO: 373 - protein, 396 aa, Homo sapiens
MVAGTRCLLALLLPQVLLGGAAGLVPELGRRKFAAASSGRPSSQPSDEVLSEFELRLLSMFGLKQRPTPSRDAVVPPYMLDLYRRHSGQPGSPAPDHRLERAASRANTVRSFHHEESLEELPETSGKTTRRFFFNLSSIPTEEFITSAELQVFREQMQDALGNNSSFHHRINIYEIIKPATANSKFPVTRLLDTRLVNQNASRWESFDVTPAVMRWTAQGHANHGFVVEVAHLEEKQGVSKRHVRISRSLHQDEHSWSQIRPLLVTFGHDGKGHPLHKREKRQAKHKQRKRLKSSCKRHPLYVDFSDVGWNDWIVAPPGYHAFYCHGECPFPLADHLNSTNHAIVQTLVNSVNSKIPKACCVPTELSAISMLYLDENEKVVLKNYQDMVVEGCGCR

SEQ ID NO: 374 - protein, 396 aa, Homo sapiens [sequence omitted]

SEQ ID NO: 375 - protein, 396 aa, Homo sapiens; identical to SEQ ID NO: 373

SEQ ID NO: 376 - protein, 129 aa, Capra hircus
NSSFHHRINIYEIIKPATANSKFPVTRLLDTRLVTQNASRWESFDVTPAVMRWTAQGLTNHGFVVEVAHPEDSHGASKRHVRISRSLHQDEHSWPQIRPLLVTFGHDGKGRPLHRREKRQAKHKQRKRL

SEQ ID NO: 377 - protein, 60 aa, Capra hircus
PLYVDFSDVGWNDWIVAPPGYHAFYCHGECPFPLADHLNSTNHAIVQTLVNSVNSKIPKA

SEQ ID NO: 378 - protein, 4 aa, Cricetulus griseus
CGCR

SEQ ID NO: 379 - protein, 4 aa, Canis lupus familiaris
CGCR

SEQ ID NO: 380 - protein, 4 aa, Bos taurus
CGCR

SEQ ID NO: 381 - protein, 280 aa, Sus scrofa
  misc_feature (152)..(152): Xaa can be any naturally occurring amino acid
SLEELPEMSGKTTRRFFFNLTSVPTEEFITSAELQVFREQTQETLDNSSSFHHRINIYEIIKPATANSKFPVTRLLDTRLVTPNASRWESFDVTPAVMRWTAQGVANHGFVVEVAHPEDSPEVSKRHVRISRSLHQDEHSWSQIRPLLVTFXHDGKGHPLHKREKRQAKHKQRKRLKSSCKRHPLYVDFSDVGWNDWIVAPPGYHAFYCHGECPFPLADHLNSTNHAIVQTLVNSVNSKIPKACCVPTELSAISMLYLDENEKVVLKNYQDMVVEGCGCR

SEQ ID NO: 382 - protein, 280 aa, Sus scrofa
SLEELPEMSGKTTRRFFFNLTSVPTEEFITSAELQVFREQTQETLDNSSSFHHRINIYEIIKPATANSKFPVTRLLDTRLVTPNASRWESFDVTPAVMRWTAQGVANHGFVVEVAHPEDSPEVSKRHVRISRSLHQDEHSWSQIRPLLVTFGHDGKGHPLHKREKRQAKHKQRKRLKSSCKRHPLYVDFSDVGWNDWIVAPPGYHAFYCHGECPFPLADHLNSTNHAIVQTLVNSVNSKIPKACCVPTELSAISMLYLDENEKVVLKNYQDMVVEGCGCR

SEQ ID NO: 383 - protein, 114 aa, Sus scrofa
MVAGTRCLLALLLPQVLLGGAADLIPELGRRKFAASTGLSSSQPSDDVLSEFELRLLSMFGLKQRPTPSRDAVVPPYMLDLYRRHSGQPGAPAPDHRLERAASLANTVRSFHHE

SEQ ID NO: 384 - protein, 114 aa, Sus scrofa; identical to SEQ ID NO: 383

SEQ ID NO: 385 - protein, 391 aa, Equus asinus
MVAGTHCLLALLLPQVLLGGAAGLIPELGRRKFAASTGRSSSQPSDDVLSEFELRLLSMFGLKQRPTPSRDAVVPPYMLDLYRRHSGQPDAPAPDHRLERAASLANTVRSFHHEESLEELPEMSGKTTRRFFFNLTSIPTEEFITSAELQVFREQMQDPWENNSNFHHRINIYEIIKPATANSKFPVTRLLDTRLVNQNASRWERFDVTPAVMRWTAQGLANHGFAVEVAHLEENRGASKRHVRISRSLHQDEHSWSQIRPLLVTFGHDGKGHPLHKREKRQAKHKQRKRLKSSCKRHPLYVDFSDVGWNDWIVAPPGYHAFYCHGECPFPLADHLNSTNHAIVQTLVNSVNSKIPKACCVPTELSAISMLYLDENEKVVLKNYQDMVVEG

SEQ ID NO: 386 - protein, 391 aa, Sus scrofa
MVAGTRCLLALLLPQVLLGGAADLIPELGRRKFAASTGLSSSQPSDDVLSEFELRLLSMFGLKQRPTPSRDAVVPPYMLDLYRRHSGQPGAPAPDHRLERAASLANTVRSFHHEESLEELPEMSGKTTRRFFFNLTSVPTEEFITSAELQVFREQTQETLDNSSSFHHRINIYEIIKPATANSKFPVTRLLDTRLVTPNASRWESFDVTPAVMRWTAQGVANHGFVVEVAHPEDSPEVSKRHVRISRSLHQDEHSWSQIRPLLVTFGHDGKGHPLHKREKRQAKHKQRKRLKSSCKRHPLYVDFSDVGWNDWIVAPPGYHAFYCHGECPFPLADHLNSTNHAIVQTLVNSVNSKIPKACCVPTELSAISMLYLDENEKVVLKNYQDMVVEG

SEQ ID NO: 387 - protein, 391 aa, Capra hircus
MVAGTRCLLALLLPQVLLGGAAGLIPELGRRKFAASAGRSSSQPSDEVLSEFELRLLSMFGLKQRPTPSRDAVVPPYMLDLYRQHSGQPGAPAPDHRLERAASLANTVRSFHHEESLEELPEMSGKTTRRFFFNLTSIPTEEFITSAELQVFRKHMPEALENNSSFHHRINIYEIIKPATANSKFPVTRLLDTRLVTQNASRWESFDVTPAVMRWTAQGLTNHGFVVEVAHPEDSHGASKRHVRISRSLHQDEHSWSQIRPLLVTFGHDGKGHPLHRREKRQAKHKQRKRLKSSCKRHPLYVDFSDVGWNDWIVAPPGYHAFYCHGECPFPLADHLNSTNHAIVQTLVNSVNSKIPKACCVPTELSAISMLYLDENEKVVLKNYQDMVVEG

SEQ ID NO: 388 - protein, 281 aa, Arctonyx collaris
MVAGTRCLLALLLPQVLLGGAAGLIPVLGRKKFAASTGRSSSQPSDEVLSEFELRLLSMFGLKRRPTPSRDAVVPPYMLDLYRRHSGQPGAPAPDHRLERAASLANTVRSFHHEEYLEELPEMSGKTTRRFFFNLTSIPTDEFITSAELQVFREQMQETLENNSSFHHRINIYEIIKPAAANLKFPVTRLLDTRLVNQNASRWESFDVTPAVMRWTAQGLTNHGFVVEVTHLEENQGVSKRHVRISRSLHQDEHSWSQIRPLLVTFGHDGKGHPLHKREKR

SEQ ID NO: 389 - protein, 391 aa, Felis catus
MVAGTRCLLALLLPQVLLGGAAGLIPELGRRKFAASTGRSSSQPSDEVLSEFELRLLSMFGLKRRPTPSRDAVVPPYMLDLYRRHSGQPGAPAPDHRLERAASLANTVRSFHHEESVEELPEMSGKTTRRFFFNLTSIPTDEFITSAELQVFREQMQETLENSSSFHHRINIYEIIKPATANLKFPMTRLLDTRLVNQNTSRWESFDVTPAVMRWTAQGLTNHGFVVEVTHLEENQGVSKRHVRISRSLHQDEHSWSQIRPLLVTFGHDGKGHPLHKREKRQAKHKQRKRLKSSCKRHPLYVDFSDVGWNDWIVAPPGYHAFYCHGECPFPLADHLNSTNHAIVQTLVNSVNSKIPKACCVPTELSAISMLYLDENEKVVLKNYQDMVVEG

SEQ ID NO: 390 - protein, 259 aa, Homo sapiens
MSEVPVARVWLVLLLLTVQVGVTAGAPWQCAPCSAEKLALCPPVSASCSEVTRSAGCGCCPMCALPLGAACGVATARCARGLSCRALPGEQQPLHALTRGQGACVQESDASAPHAAEAGSPESPESTEITEEELLDNFHLMAPSEEDHSILWDAISTYDGSKALHVTNIKKWKEPCRIELYRVVESLAKAQETSGEEISKFYLPNCNKNGFYHSRQCETSMDGEAGLCWCVYPWNGKRIPGSPEIRGDPNCQMYFNVQN

SEQ ID NO: 391 - protein, 259 aa, Homo sapiens
MSEVPVARVWLVLLLLTVQVGVTAGAPWQCAPCSAEKLALCPPVSASCSEVTRSAGCGCCPMCALPLGAACGVATARCARGLSCRALPGEQQPLHALTRGQGACVQESDASAPHAAEAGSPESPESTEITEEELLDNFHLMAPSEEDHSILWDAISTYDGSKALHVTNIKKWKEPCRIELYRVVESLAKAQETSGEEISKFYLPNCNKNGFYHSRQCETSMDGEAGLCWCVYPWNGKRIPGSPEIRGDPNCQIYFNVQN

SEQ ID NO: 392 - protein, 259 aa, Homo sapiens; identical to SEQ ID NO: 391

SEQ ID NO: 393 - protein, 272 aa, Mus musculus
MPEFLTVVSWPFLILLSFQIGVAAGAPQPWHCAPCTAERLGLCPPVPASCPEISRPAGCGCCPTCALPMGAACGVATARCAQGLSCRALPGEPRPLHALTRGQGACVPEPAAPATSTLFSSQHEEAKAAVVSADELSESPEMTEEQLLDSFHLMAPSREDQPILWNAISTYSSMRAREIADLKKWKEPCQRELYKVLERLAAAQQKAGDEIYKFYLPNCNKNGFYHSKQCETSLDGEAGLCWCVYPWSGKKIPGSLETRGDPNCHQYFNVHN

SEQ ID NO: 394 - protein, 263 aa, Ovis aries
MPEVLAVRAWPLLPSLAVQLGATVGAPQPWRCAPCSAERLALCPPVPASCPELTRSAGCGCCPMCALPLGAACGVATARCARGLSCRALPGEPRPLHALTRGQGACMTTPSDEATDTKDTTSPENVSPESSEITQEQLLDNFHLMTESSEDLPILWNAISNYESLKALEISDVKKWKEPCQRELYKVLDRLAREQQKAGDKLYKFYLPNCNKNGFYHSKQCETSLDGEPGLCWCVYPWSGKRILGSVAIRGDPQCQQYFNLQN

SEQ ID NO: 395 - protein, 263 aa, Bos taurus
MPEVLAVRAWPLLLSLAVQLGATVGAPQPWRCAPCSAERMALCPPVPASCPELTRSAGCGCCPMCALPLGAACGVATARCARGLSCRALPGEPRPLHALTRGQGACMTTPSDEATDTKDTTSPENVSPESSEITQEQLLDNFHLMAESSEDLPILWNAISNYESLRALEISDVKKWKEPCQRELYKVLDRLAREQQKAGDKLYKFYLPNCNKNGFYHSKQCETSLEGEPGLCWCVYPWSGKRILGSVAVRGDPKCQQYFNLQN

SEQ ID NO: 396 - protein, 272 aa, Rattus norvegicus
MPEFLTVVSWPFLILLSFQVRVVAGAPQPWHCAPCTAERLELCPPVPASCPEISRPAGCGCCPTCALPLGAACGVATARCAQGLSCRALPGEPRPLHALTRGQGACVLEPAAPATSSLSGSQHEEAKAAVASEDELAESPEMTEEQLLDSFHLMAPSREDQPILWNAISTYSSMRAREITDLKKWKEPCQRELYKVLERLAAAQQKAGDEIYKFYLPNCNKNGFYHSKQCETSLDGEAGLCWCVYPWSGKKIPGSLETRGDPNCHQYFNVQN

SEQ ID NO: 397 - protein, 36 aa, Oryctolagus cuniculus
RVLEQLAKAQQEAGGDVYRFYLPNCNKNGFYHSKQC

SEQ ID NO: 398 - protein, 244 aa, Oncorhynchus mykiss
MLGLYKKLTLLAAMSLSLLTTLAQSSPVVGPEPIRCAPCTQEKLDECPAISPDCKQVLREPGCGCCMACALEKGASCGVYTAHCAQGLKCSPRAGDPRPLHSLTRGQAICTEDQGQEKVEGVPDHSSLAYFLGLNTPFDTKNEGAQESIKAKVNTIRKKLEEQGPCHIELHAALDKITSSQQELGEKFTNFYLPNCDKHGFYKAKQCESSLVGPHARCWCVSSWNGKKILGSNYLPGLECQLEL

SEQ ID NO: 399 - protein, 259 aa, Homo sapiens; identical to SEQ ID NO: 391

SEQ ID NO: 400 - protein, 259 aa, Homo sapiens; identical to SEQ ID NO: 391

SEQ ID NO: 401 - protein, 269 aa, Xenopus laevis
MARENVSCCNLFVCLLFIAAAIVVAESLHCAQCTEERLALCPPVPSDCPELAREPGCGCCLTCALKRGESCGVYTARCGKALSCHPKAGETRPLYALTRGQGICMDADDLKRLRPSEAADGKDYAEHENVAPEVTDLSHDQIPPFLRLFPDGFDKLDPWNAITVYESLKARKMLERRKWKELQGPCQKDLYKTMDKLTKAQQRPGEDVFKFHIPNCNRNGFYHSKQCEVSLDGERGKCWCVFPLTGKKIPGSPENRGDLNCQQFLNAQE

SEQ ID NO: 402 - protein, 259 aa, Homo sapiens; identical to SEQ ID NO: 390

SEQ ID NO: 403 - protein, 272 aa, Mus musculus
MPEFLTVVSWPFLILLSFQIGVAAGAPQPWHCAPCTAERLGLCPPVPASCPEISRPAGCGCCPTCALPMGAACGVATARCAQGLSCRALPGEPRPLHALTRGQGACVPEPAAPATSTLSSSQHEEAKAAVVSADELSESPEMTEEQLLDSFHLMAPSREDQPILWNAISTYSSMRAREIADLKKWKEPCQRELYKVLERLAAAQQKAGDEIYKFYLPNCNKNGFYHSKQCETSLDGEAGLCWCVYPWSGKKIPGSLETRGDPNCHQYFNVHN

SEQ ID NO: 404 - protein, 259 aa, Homo sapiens; identical to SEQ ID NO: 391

SEQ ID NO: 405 - protein, 267 aa, Xenopus (Silurana) tropicalis
MARENISCCSLLATLLFIAAAIVVAEPLHCAQCTEERLASCPSVPNDCPELAREPGCGCCLTCALKRGEPCGVYTARCGKALSCHPKAGESRPLYALTRGQGICMDAEDLKKLRASDAADGKDYTEHENVAPEVSDISHDQIPPFLRLFPEGLDKLDPWNAITVYEKARKLLERRKWKEHQGPCQKDLYKTMDKLVKAQQRPGEDVFKFHIPNCNRNGFYHSKQCEASLDGERGKCWCVFPLTGKRIPGSPENRGELNCQQYLNVQE

SEQ ID NO: 406 - protein, 272 aa, Rattus norvegicus; identical to SEQ ID NO: 396

SEQ ID NO: 407 - protein, 259 aa, Homo sapiens; identical to SEQ ID NO: 391

SEQ ID NO: 408 - protein, 259 aa, Homo sapiens [sequence omitted]

SEQ ID NO: 409 - protein, 328 aa, Homo sapiens
MLPRVGCPALPLPPPPLLPLLPLLLLLLGASGGGGGARAEVLFRCPPCTPERLAACGPPPVAPPAAVAAVAGGARMPCAELVREPGCGCCSVCARLEGEACGVYTPRCGQGLRCYPHPGSELPLQALVMGEGTCEKRRDAEYGASPEQVADNGDDHSEGGLVENHVDSTMNMLGGGGSAGRKPLKSGMKELAVFREKVTEQHRQMGKGGKHHLGLEEPKKLRPPPARTPCQQELDQVLERISTMRLPDERGPLEHLYSLHIPNCDKHGLYNLKQCKMSLNGQRGECWCVNPNTGKLIQGAPTIRGDPECHLFYNEQQEARGVHTQRMQ

SEQ ID NO: 410 - protein, 259 aa, Homo sapiens; identical to SEQ ID NO: 391

SEQ ID NO: 411 - protein, 267 aa, Xenopus (Silurana) tropicalis; identical to SEQ ID NO: 405

SEQ ID NO: 412 - protein, 272 aa, Mus musculus; identical to SEQ ID NO: 393

SEQ ID NO: 413 - protein, 262 aa, Danio rerio
MNRLLLNFFWVAAFSALLAAPGLRASPVVGQEPIRCAPCSPERLAECPAVDAGCEEVLREPGCGCCLACALKRGDPCGIYTAPCGSGLRCLPKPGEARPLHALTRGQAVCTESPEPNHSQSETAPDHPESHNGPTAVNEGSSTVFVTGHGKPFDPRIITNKESMKAKVNAIRKKLVEQGPCHIELQTALDKITKSQQKLGDKLTRFYLPNCDKHGLYKIKQCESSLDGQRGKCWCVSSWNGKKIPGSSDLPADAECPEELNH

SEQ ID NO: 414 - protein, 244 aa, Oncorhynchus mykiss; identical to SEQ ID NO: 398

SEQ ID NO: 415 - protein, 269 aa, Gallus gallus
MRTLLSRCWLPPLLLPALLGPLLVAAASLQPLHCAPCTQEKLALCPPVEPGCPETARQPGCGCCQTCALGPGQPCGVYTTRCRHGLRCHVPSGETRPLSALIQGQGKCLPASEAGGTRSAEPAESTEPEDLPLESSEITQDQMLNYQLMFPISQDKSIPWNFFTVYENMKAKRISEHKKWKEQGPCQKELYRALYKLAKAQQRSGGDIYKFYLPNCNKNGFYHSKQCETSLDGDSAGCWCVYPKNGIKIPGSPEVKGDSDCQQYLRSEE

SEQ ID NO: 416 - protein, 263 aa, Bos taurus; identical to SEQ ID NO: 395

SEQ ID NO: 417 - protein, 262 aa, Sus scrofa
MPEVPAVRAWPLLLSLALQLGAAAGAPQPLHCAPCSAERLALCPPVPASCPEATRPAGCGCCPTCALPLGACGVATARCARGLSCRALPGEPRPLHALTRGQGACMPAPSAEATETKDPAAPETTSPESTEMTQEQLLDSFHLMATSSEDLPILWNAINNYESMKALEATDIKKWKEPCQRELYKVLDRLAREQQKAGDRLYKFYLPNCNKNGFYHSKQCETSLEGEPGLCWCVYPWSGKKILGSTAVRGDPKCHQYFNSQN

SEQ ID NO: 418 - protein, 132 aa, Sus scrofa
EMTQEQLLDSFHLMATSSEDLPILWNAINNYESMKALEATDIKKWKEPCQRELYKVLDRLAREQQKAGDRLYKFYLPNCNKNGFYHSKQCETSLEGEPGLCWCVYPWSGKKILGSTAVRGDPKCHQYFNSQN

SEQ ID NO: 419 - protein, 398 aa, Homo sapiens
MEGAALLRVSVLCIWMSALFLGVGVRAEEAGARVQQNVPSGTDTGDPQSKPLGDWAAGTMDPESSIFIEDAIKYFKEKVSTQNLLLLLTDNEAWNGFVAAAELPRNEADELRKALDNLARQMIMKDKNWHDKGQQYRNWFLKEFPRLKSELEDNIRRLRALADGVQKVHKGTTIANVVSGSLSISSGILTLVGMGLAPFTEGGSLVLLEPGMELGITAALTGITSSTMDYGKKWWTQAQAHDLVIKSLDKLKEVREFLGENISNFLSLAGNTYQLTRGIGKDIRALRRARANLQSVPHASASRPRVTEPISAESGEQVERVNEPSILEMSRGVKLTDVAPVSFFLVLDVVYLVYESKHLHEGAKSETAEELKKVAQELEEKLNILNNNYKILQADQEL

SEQ ID NO: 420 - protein, 160 aa, Homo sapiens
MEGAALLRVSVLCIWMSALFLGVGVRAEEAGARVQQNVPSGTDTGDPQSKPLGDWAAGTMDPESSIFIEDAIKYFKEKVSTQNLLLLLTDNEAWNGFVAAAELPRNEADELRKALDNLARQMIMKDKNWHDKGQQYRNWFLKEFPRLKSELEDNIRRLRA

SEQ ID NO: 421 - protein, 141 aa, Homo sapiens
MEGAALLRVSVLCIWMSALFLGVGVRAEEAGARVQQNVPSGTDTGDPQSKPLGDWAAGTMDPGPAGSRGDSGEPCTLRPACRGQRQHGGASRISAEGPAPMPRRRTPSTAHLRVPKTSRRNLLCMRAVSLLRMPLSISRKK

SEQ ID NO: 422 - protein, 398 aa, Homo sapiens; identical to SEQ ID NO: 419

SEQ ID NO: 423 - protein, 398 aa, Homo sapiens
MEGAALLRVSVLCIWMSALFLGVGVRAEEAGARVQQNVPSGTDTGDPQSKPLGDWAAGTMDPESSIFIEDAIKYFKEKVSTQNLLLLLTDNEAWNGFVAAAELPRNEADELRKALDNLARQMIMKDKNWHDKGQQYRNWFLKEFPRLKSKLEDNIRRLRALADGVQKVHKGTTIANVVSGSLSISSGILTLVGMGLAPFTEGGSLVLLEPGMELGITAALTGITSSTIDYGKKWWTQAQAHDLVIKSLDKLKEVKEFLGENISNFLSLAGNTYQLTRGIGKDIRALRRARANLQSVPHASASRPRVTEPISAESGEQVERVNEPSILEMSRGVKLTDVAPVSFFLVLDVVYLVYESKHLHEGAKSETAEELKKVAQELEEKLNILNNNYKILQADQEL

SEQ ID NO: 424 - protein, 439 aa, Homo sapiens
GGPVWLLYRRITGGGIHTAQNSWILLSLCQGKIPWRRPCSDMEGAALLRVSVLCIWMSALFLGVGVRAEEAGARVQQNVPSGTDTGDPQSKPLGDWAAGTMDPESSIFIEDAIKYFKEKVSTQNLLLLLTDNEAWNGFVAAAELPRNEADELRKALDNLARQMIMKDKNWHDKGQQYRNWFLKEFPRLKSKLEDNIRRLRALADGVQKVHKGTTIANVVSGSLSISSGILTLVGMGLAPFTEGGSLVLLEPGMELGITAALTGITSSTIDYGKKWWTQAQAHDLVIKSLDKLKEVKEFLGENISNFLSLAGNTYQLTRGIGKDIRALRRARANLQSVPHASASRPRVTEPISAESGEQVERVNEPSILEMSRGVKLTDVAPVSFFLVLDVVYLVYESKHLHEGAKSETAEELKKVAQELEEKLNILNNNYKILQADQEL

SEQ ID NO: 425 - protein, 398 aa, Homo sapiens; identical to SEQ ID NO: 423

SEQ ID NO: 426 - protein, 398 aa, Homo sapiens; identical to SEQ ID NO: 423

SEQ ID NO: 427 - protein, 430 aa, Homo sapiens
RITGGGIHTAQNSWILLSLCQGKIPWRRPCSDMEGAALLRVSVLCIWMSALFLGVGVRAEEAGARVQQNVPSGTDTGDPQSKPLGDWAAGTMDPESSIFIEDAIKYFKEKVSTQNLLLLLTDNEAWNGFVAAAELPRNEADELRKALDNLARQMIMKDKNWHDKGQQYRNWFLKEFPRLKSKLEDNIRRLRALADGVQKVHKGTTIANVVSGSLSISSGILTLVGMGLAPFTEGGSLVLLEPGMELGITAALTGITSSTIDYGKKWWTQAQAHDLVIKSLDKLKEVKEFLGENISNFLSLAGNTYQLTRGIGKDIRALRRARANLQSVPHASASRPRVTEPISAESGEQVERVNEPSILEMSRGVKLTDVAPVSFFLVLDVVYLVYESKHLHEGAKSETAEELKKVAQELEEKLNILNNNYKILQADQEL

SEQ ID NO: 428 - protein, 430 aa, Homo sapiens
RITGGGIHTAQNSWILLSLCQGKIPWRRPCSDMEGAALLRVSVLCIWMSALFLGVGVRAEEAGARVQQNVPSGTDTGDPQSKPLGDWAAGTMDPESSIFIEDAIKYFKEKVSTQNLLLLLTDNEAWNGFVAAAELPRNEADELRKALDNLARQMIMKDKNWHDKGQQYRNWFLKEFPRLKSKLEDNIRRFRALADGVQKVHKGTTIANVVSGSLSISSGILTLVGMGLAPFTEGGSLVLLEPGMELGITAALTGITSSTIDYGKKWWTQAQAHDLVIKSLDKLKEVKEFLGENISNFLSLAGNTYQLTRGIGKDIRALRRARANLQSVPHASASRPRVTEPISAESGEQVERVNEPSILEMSRGVKLTDVAPVSFFLVLDVVYLVYESKHLHEGAKSETAEELKKVAQELEEKLNILNNNYKILQADQEL

SEQ ID NO: 429 - protein, 398 aa, Homo sapiens [sequence omitted]

SEQ ID NO: 430 - protein, 398 aa, Homo sapiens [sequence omitted]

SEQ ID NO: 431 - protein, 414 aa, Homo sapiens [sequence omitted]

SEQ ID NO: 432 - protein, 414 aa, Homo sapiens [sequence omitted]

SEQ ID NO: 433 - protein, 380 aa, Homo sapiens [sequence omitted]

SEQ ID NO: 434 - protein, 118 aa, Homo sapiens
MRFKSHTVELRSTLSQPLFSCSRRRPCSDMEGAALLRVSVLCIWMSALFLGVGVRAEEAGARVQQNVPSGTDTGDPQSKPLGDWAAGTMDPESSIFIEDAIKYFKEKVSTQNLLLLLT

SEQ ID NO: 435 - protein, 414 aa, Homo sapiens
MRFKSHTVELRRPCSDMEGAALLRVSVLCIWMSALFLGVGVRAEEAGARVQQNVPSGTDTGDPQSKPLGDWAAGTMDPESSIFIEDAIKYFKEKVSTQNLLLLLTDNEAWNGFVAAAELPRNEADELRKALDNLARQMIMKDKNWHDKGQQYRNWFLKEFPRLKSELEDNIRRLRALADGVQKVHKGTTIANVVSGSLSISSGILTLVGMGLAPFTEGGSLVLLEPGMELGITAALTGITSSTMDYGKKWWTQAQAHDLVIKSLDKLKEVREFLGENISNFLSLAGNTYQLTRGIGKDIRALRRARANLQSVPHASASRPRVTEPISAESGEQVERVNEPSILEMSRGVKLTDVAPVSFFLVLDVVYLVYESKHLHEGAKSETAEELKKVAQELEEKLNILNNNYKILQADQEL

SEQ ID NO: 436 - protein, 326 aa, Danio rerio
MEWLDDFRLSETQREDEEDLEGLMDWWNTVEQWEDMPKNDNMTEKEEAKAFAVTADKVQKGIRVFNKLFSERAEGLWQHVIDLHAIADGLDRFNKKTKIAQITGGSTSAVGGVATITGLILAPFTMGTSLIVTAVGLGVAMAGGLTSASAGITSTVNNSLDRKKVERIVGDYQAKMGDLNKCMKFIKQGITNLRKFNLNKMKKHAYNRDFPCFDNVYEDGAMAGKAILTNANEIMRVMQIANVAGTTAARAVQIASISTGVLTGLFVGMDIYFVAKDSHELKNGAKSEFAAKIREVAEQLHEGLMELNVIRDELRMTTTVKEDQTS

SEQ ID NO: 437 - protein, 326 aa, Danio rerio; identical to SEQ ID NO: 436

SEQ ID NO: 438 - protein, 398 aa, Homo sapiens; identical to SEQ ID NO: 423

SEQ ID NO: 439 - protein, 833 aa, Mus musculus
MAHSACGFSVALLGALLLGTARLLRGTEASEIALPQRSGVTVSIKLGNPALPVKICYIVMSRQHITELIIRPGERKSFTFSCSNPEKHFVLKIEKNIDCMSGPCPFGEVHLQPSTSELPILNRTFIWDVRAHKSIGLELQFATPRLRQIGPGESCADGVTHSISGHIDATEVRIGTFCSNGTVSRIKMQEGVKMALHLPWFHRRNVSGFSIANRSSIKRLCIIESVFEGEGSATLMSANYPGGFPEDELMTWQFVVPAHLRASVSFLNFNVSNCERKEERVEYYIPGSTTNPEVFRLEDKQPGNMAGNFNLSLQGCDQDAQSPGILRLQFQVLVQRPQDESNKTYMVDLSRERTMSLTIEPRPVKHGRRFVPGCFVCLESRTCSTNVTLTAGSIHKISFLCDDLTRLWVNVEKTLSCLDHRYCYRQSFKLQVPDYILQLPVQLHDFSWKLLVPKDKLSLMLVPGQKLQQHTQERPCNTSFGYHVTSTTPGQDLYFGSFCSGGSIEKIQVKQNSSVTLRAYAPSFQQEVSKQGLIVSYTPYFKEEGIFTVTPDTKNKVYLRSPNWDRGLPALSSVSWNISVPSNQVACLTVLKERSGLACQSGRAFMIIQEQQSRAEEIFSLEEEVLPKPSFHHHSFWVNISNCSPMNGKQLDLLFWVTLTPRTVDLAVVIGAAGGGALLLFALVLIICFVKKKKKVDKGPAVGIYNGNVNTQMPQTQKFPKGRKDNDSHVYAVIEDTMVYGHLLQDSGGSFIQPEVDTYRPFQGPMGDCPPTPPPLFSRTPTAKFTAEELAPSSPPESESEPYTFSHPNKGEIGVRETDIPLLHTQGPVETEE

1. A pharmaceutical composition comprising:
an active agent comprising a polypeptide selected from the group consisting of GALNT1 polypeptides, LGALS3BP polypeptides, MFAP5 polypeptides, HAPLN1 polypeptides, PENK polypeptides, and combinations thereof; and
a pharmaceutically acceptable carrier or excipient;
the composition being characterized in that:
the polypeptide is present in an amount sufficient to cause a change selected from the group consisting of:
an increase in production of at least one anti-inflammatory agent by leukocytes in culture as compared with a level observed under otherwise comparable conditions absent the polypeptide;
a decrease in production of at least one pro-inflammatory agent by leukocytes in culture as compared with a level observed under otherwise comparable conditions absent the polypeptide; and
combinations thereof.

2. The pharmaceutical composition of claim 1, wherein the polypeptide comprises one or more GALNT1 polypeptide.

3. The pharmaceutical composition of claim 1, wherein the polypeptide comprises one or more LGALS3BP polypeptide.

4. The pharmaceutical composition of claim 1, wherein polypeptide comprises one or more MFAP5 polypeptide.

5. The pharmaceutical composition of claim 1, wherein the polypeptide comprises one or more PENK polypeptide.

6. The pharmaceutical composition of claim 1, wherein the polypeptide comprises one or more HAPLN1 polypeptide.

7. The pharmaceutical composition of claim 2, wherein the GALNT1 polypeptide is present at a concentration within one order of magnitude of that at which a polypeptide selected from the group consisting of SEQ ID NOs: 223-242 is found in human serum.

8. The pharmaceutical composition of claim 3, wherein the LGALS3BP polypeptide is present at a concentration within one order of magnitude of that at which a polypeptide selected from the group consisting of SEQ ID NOs: 329-353 is found in human serum.

9. The pharmaceutical composition of claim 4, wherein the MFAP5 polypeptide is present at a concentration within one order of magnitude of that at which a polypeptide selected from the group consisting of SEQ ID NOs: 130-144 is found in human serum.

10. The pharmaceutical composition of claim 5, wherein the PENK polypeptide is present at a concentration within one order of magnitude of that at which a polypeptide selected from the group consisting of SEQ ID NOs: 194-217 is found in human serum.

11. The pharmaceutical composition of claim 6, wherein the HAPLN1 polypeptide is present at a concentration within one order of magnitude of that at which a polypeptide selected from the group consisting of SEQ ID NOs: 41-55 is found in human serum.

12-16. (canceled)

17. The pharmaceutical composition of claim 1, wherein the polypeptide comprises at least two distinct polypeptides selected from the group consisting of GALNT1 polypeptides, LGALS3BP polypeptides, MFAP5 polypeptides, HAPLN1 polypeptides, PENK polypeptides, and combinations thereof.

18. The pharmaceutical composition of claim 17, wherein the polypeptide comprises at least one LGALS3BP polypeptide, and at least one MFAP5 polypeptide.

19. The pharmaceutical composition of claim 17, wherein the polypeptide comprises at least one LGALS3BP polypeptide, and at least one PENK polypeptide.

20. The pharmaceutical composition of claim 17, wherein the polypeptide comprises at least one LGALS3BP polypeptide, and at least one HAPLN1 polypeptide.

21. The pharmaceutical composition of claim 17, wherein the polypeptide comprises at least one MFAP5 polypeptide, and at least one PENK polypeptide.

22. The pharmaceutical composition of claim 17, wherein the polypeptide comprises at least one MFAP5 polypeptide, and at least one HAPLN1 polypeptide.

23. The pharmaceutical composition of claim 17, wherein the polypeptide comprises at least one PENK polypeptide, and at least one HAPLN1 polypeptide.

24. The pharmaceutical composition of claim 1, wherein the polypeptide comprises at least one distinct polypeptide selected from the group consisting of GALNT1 polypeptides, LGALS3BP polypeptides, MFAP5 polypeptides, HAPLN1 polypeptides, PENK polypeptides in combination with at least one distinct polypeptide from the group consisting of TFIP2 polypeptides, HB-EGF polypeptides, PCOLCE2 polypeptides, FNDC1 polypeptides, LIF polypeptides, INHBA polypeptides, SRGN polypeptides, CRISPLD1 polypeptides, ADAMTSL1 polypeptides, CDCP1 polypeptides, CRLF1 polypeptides, CFH polypeptides, FN1 polypeptides, SERPINE1 polypeptides, BMP2 polypeptides, IGFBP1 polypeptides, APOL1 polypeptides, and combinations thereof.

25-33. (canceled)

34. A pharmaceutical composition comprising:
an active agent comprising an antibody specific to a polypeptide selected from the group consisting of GALNT1 polypeptides, LGALS3BP polypeptides, MFAP5 polypeptides, HAPLN1 polypeptides, PENK polypeptides; and
a pharmaceutically acceptable carrier or excipient;
the composition being characterized in that:
the antibody is present in an amount sufficient to inhibit, as compared with a level observed under otherwise comparable conditions absent the antibody, an activity characteristic of the polypeptide to which the antibody is specific, the ability being selected from the group consisting of:
an ability to increase production of at least one anti-inflammatory agent by leukocytes in culture as compared with a level observed under otherwise comparable conditions absent the polypeptides;
an ability to decrease production of at least one pro-inflammatory agent by leukocytes in culture as compared with a level observed under otherwise comparable conditions absent the polypeptide; and
combinations thereof.

35. The pharmaceutical composition of claim 34, wherein the antibody is specific for one or more GALNT1 polypeptide.

36. The pharmaceutical composition of claim 34, wherein the antibody is specific for one or more LGALS3BP polypeptide.

37. The pharmaceutical composition of claim 34, wherein antibody is specific for one or more MFAP5 polypeptide.

38. The pharmaceutical composition of claim 34, wherein the antibody is specific for one or more PENK polypeptide.

39. The pharmaceutical composition of claim 34, wherein the antibody is specific for one or more HAPLN1 polypeptide.

40. The pharmaceutical composition of claim 35 wherein a GALNT1 polypeptide has an amino acid sequence that shows at least 50% overall identity with a polypeptide selected from the group consisting of SEQ ID NOs: 223-242.

41. The pharmaceutical composition of claim 36 wherein a LGALS3BP polypeptide has an amino acid sequence that shows at least 50% overall identity with a polypeptide selected from the group consisting of SEQ ID NOs: 329-353.

42. The pharmaceutical composition of claim 37 wherein a MFAP5 polypeptide has an amino acid sequence that shows at least 50% overall identity with a polypeptide selected from the group consisting of SEQ ID NOs: 130-144.

43. The pharmaceutical composition of claim 38 wherein a PENK polypeptide has an amino acid sequence that shows at least 50% overall identity with a polypeptide selected from the group consisting of SEQ ID NOs: 194-217.

44. The pharmaceutical composition of claim 39 wherein a HAPLN1 polypeptide has an amino acid sequence that shows at least 50% overall identity with a polypeptide selected from the group consisting of SEQ ID NOs: 41-55.

45-55. (canceled)

56. A method comprising steps of:
determining a level of a polypeptide selected from the group consisting of GALNT1 polypeptides, LGALS3BP polypeptides, MFAP5 polypeptides, HAPLN1 polypeptides, PENK polypeptides, and combinations thereof present in a sample;
based on the determined level, establishing likelihood that the sample is expected to have therapeutic activity.

57. The method of claim 56, wherein:
the step of determining comprises determining a level of a polypeptide selected from the group consisting of GALNT1 polypeptides, LGALS3BP polypeptides, MFAP5 polypeptides, HAPLN1 polypeptides, PENK polypeptides, and combinations thereof present in a sample that comprises one or more marrow stromal cells in a test sample; and
the step of establishing comprises likelihood that the sample contains marrow stromal cells expected to have therapeutic activity.
